United States Patent Application Publication US 2024/0309320 A1 - sequence listing, part 6

SEQ ID NO: 8433 - DNA, 24 bp, synthetic construct
  misc_feature 1..24: note = Synthetic
  source 1..24: mol_type = other DNA
cggcatcggcacgtcgtccctggt

SEQ ID NO: 8434 - DNA, 24 bp, synthetic construct
  misc_feature 1..24: note = Synthetic
  source 1..24: mol_type = other DNA
ccatagcatcctcgctgaatccta

SEQ ID NO: 8435 - DNA, 24 bp, synthetic construct
  misc_feature 1..24: note = Synthetic
  source 1..24: mol_type = other DNA
ctaccttctattagtgtctccagc

SEQ ID NO: 8436 - DNA, 24 bp, synthetic construct
  misc_feature 1..24: note = Synthetic
  source 1..24: mol_type = other DNA
actataatcctcacgtgcggctta

SEQ ID NO: 8437 - DNA, 24 bp, synthetic construct
  misc_feature 1..24: note = Synthetic
  source 1..24: mol_type = other DNA
ggactgaaggttataaggctagcc

SEQ ID NO: 8438 - DNA, 24 bp, synthetic construct
  misc_feature 1..24: note = Synthetic
  source 1..24: mol_type = other DNA
ccgaatgtctaatgcagtggcggt

SEQ ID NO: 8439 - DNA, 24 bp, synthetic construct
  misc_feature 1..24: note = Synthetic
  source 1..24: mol_type = other DNA
gttatagcataaggctcactttgg

SEQ ID NO: 8440 - DNA, 24 bp, synthetic construct
  misc_feature 1..24: note = Synthetic
  source 1..24: mol_type = other DNA
cgactttcactcggataggacacc

SEQ ID NO: 8441 - DNA, 24 bp, synthetic construct
  misc_feature 1..24: note = Synthetic
  source 1..24: mol_type = other DNA
ttggcagatcggtgcgttacggcg

SEQ ID NO: 8442 - DNA, 24 bp, synthetic construct
  misc_feature 1..24: note = Synthetic
  source 1..24: mol_type = other DNA
atttcatacttggagcacttcggg

SEQ ID NO: 8443 - DNA, 24 bp, synthetic construct
  misc_feature 1..24: note = Synthetic
  source 1..24: mol_type = other DNA
tggtacgggatgcgacgacccgga

SEQ ID NO: 8444 - DNA, 24 bp, synthetic construct
  misc_feature 1..24: note = Synthetic
  source 1..24: mol_type = other DNA
gcatactagctatcagaactcttc

SEQ ID NO: 8445 - DNA, 24 bp, synthetic construct
  misc_feature 1..24: note = Synthetic
  source 1..24: mol_type = other DNA
caagcagactctaaactcggatca

SEQ ID NO: 8446 - DNA, 24 bp, synthetic construct
  misc_feature 1..24: note = Synthetic
  source 1..24: mol_type = other DNA
tgcagtgtataggtttgaggacaa

SEQ ID NO: 8447 - DNA, 24 bp, synthetic construct
  misc_feature 1..24: note = Synthetic
  source 1..24: mol_type = other DNA
tcgctctacagagactgtatcggc

SEQ ID NO: 8448 - DNA, 24 bp, synthetic construct
  misc_feature 1..24: note = Synthetic
  source 1..24: mol_type = other DNA
ttatccggaggaggatgatcgcaa

SEQ ID NO: 8449 - DNA, 24 bp, synthetic construct
  misc_feature 1..24: note = Synthetic
  source 1..24: mol_type = other DNA
tgaatggatgttatcatcaatatc

SEQ ID NO: 8450 - DNA, 24 bp, synthetic construct
  misc_feature 1..24: note = Synthetic
  source 1..24: mol_type = other DNA
catcttgttgcctagatcgttagt

SEQ ID NO: 8451 - DNA, 24 bp, synthetic construct
  misc_feature 1..24: note = Synthetic
  source 1..24: mol_type = other DNA
cgctggatccaacccaacagtgga

SEQ ID NO: 8452 - DNA, 24 bp, synthetic construct
  misc_feature 1..24: note = Synthetic
  source 1..24: mol_type = other DNA
gagctcagttcgtcaagcagtatg

SEQ ID NO: 8453 - DNA, 24 bp, synthetic construct
  misc_feature 1..24: note = Synthetic
  source 1..24: mol_type = other DNA
gagcgccctcccggaaggaattgg

SEQ ID NO: 8454 - DNA, 24 bp, synthetic construct
  misc_feature 1..24: note = Synthetic
  source 1..24: mol_type = other DNA
tttcgacttaacaaacgagtagtg

SEQ ID NO: 8455 - DNA, 24 bp, synthetic construct
  misc_feature 1..24: note = Synthetic
  source 1..24: mol_type = other DNA
cgcttccagttctctgggtgaatg

SEQ ID NO: 8456 - DNA, 24 bp, synthetic construct
  misc_feature 1..24: note = Synthetic
  source 1..24: mol_type = other DNA
gatcggcctcaatcccgaggcagg

SEQ ID NO: 8457 - DNA, 24 bp, synthetic construct
  misc_feature 1..24: note = Synthetic
  source 1..24: mol_type = other DNA
tctctctccgtccattacctaata

SEQ ID NO: 8458 - DNA, 24 bp, synthetic construct
  misc_feature 1..24: note = Synthetic
  source 1..24: mol_type = other DNA
gatgacccgggcgatcgagaataa

SEQ ID NO: 8459 - DNA, 24 bp, synthetic construct
  misc_feature 1..24: note = Synthetic
  source 1..24: mol_type = other DNA
gagatgctgctcagagttgctccg

SEQ ID NO: 8460 - DNA, 24 bp, synthetic construct
  misc_feature 1..24: note = Synthetic
  source 1..24: mol_type = other DNA
cgcaacatgggtcagcatcctcat

SEQ ID NO: 8461 - DNA, 24 bp, synthetic construct
  misc_feature 1..24: note = Synthetic
  source 1..24: mol_type = other DNA
tatgttctcaccatctcattcaaa

SEQ ID NO: 8462 - DNA, 24 bp, synthetic construct
  misc_feature 1..24: note = Synthetic
  source 1..24: mol_type = other DNA
aagtctattcatgatatgccacgc

SEQ ID NO: 8463 - DNA, 24 bp, synthetic construct
  misc_feature 1..24: note = Synthetic
  source 1..24: mol_type = other DNA
acaaaccgttaaatgtggacgtgg

SEQ ID NO: 8464 - DNA, 24 bp, synthetic construct
  misc_feature 1..24: note = Synthetic
  source 1..24: mol_type = other DNA
ttccgtcctttcgaattgagtgaa

SEQ ID NO: 8465 - DNA, 24 bp, synthetic construct
  misc_feature 1..24: note = Synthetic
  source 1..24: mol_type = other DNA
atggtggttgtaatgtcgatacat

SEQ ID NO: 8466 - DNA, 24 bp, synthetic construct
  misc_feature 1..24: note = Synthetic
  source 1..24: mol_type = other DNA
ttggtgaacctacaatgacaaggg

SEQ ID NO: 8467 - DNA, 24 bp, synthetic construct
  misc_feature 1..24: note = Synthetic
  source 1..24: mol_type = other DNA
cgtgaagagggcgagaaccaagcc

SEQ ID NO: 8468 - DNA, 24 bp, synthetic construct
  misc_feature 1..24: note = Synthetic
  source 1..24: mol_type = other DNA
tatgcaagtatatccgtcctcatg

SEQ ID NO: 8469 - DNA, 24 bp, synthetic construct
  misc_feature 1..24: note = Synthetic
  source 1..24: mol_type = other DNA
aataagggagccggatatgtcgag

SEQ ID NO: 8470 - DNA, 24 bp, synthetic construct
  misc_feature 1..24: note = Synthetic
  source 1..24: mol_type = other DNA
ctgtttcctgatatatgtaccaag

SEQ ID NO: 8471 - DNA, 24 bp, synthetic construct
  misc_feature 1..24: note = Synthetic
  source 1..24: mol_type = other DNA
caaaggagctgtctaactcgggac

SEQ ID NO: 8472 - DNA, 24 bp, synthetic construct
  misc_feature 1..24: note = Synthetic
  source 1..24: mol_type = other DNA
cgcctcacttattccgggtaaaga

SEQ ID NO: 8473 - DNA, 24 bp, synthetic construct
  misc_feature 1..24: note = Synthetic
  source 1..24: mol_type = other DNA
gcttctgcattgatcgtccagcca

SEQ ID NO: 8474 - DNA, 24 bp, synthetic construct
  misc_feature 1..24: note = Synthetic
  source 1..24: mol_type = other DNA
aagagtcccggaggcgtgcccgat

SEQ ID NO: 8475 - DNA, 24 bp, synthetic construct
  misc_feature 1..24: note = Synthetic
  source 1..24: mol_type = other DNA
ggtcgatcgtcgcccatgcatcaa

SEQ ID NO: 8476 - DNA, 24 bp, synthetic construct
  misc_feature 1..24: note = Synthetic
  source 1..24: mol_type = other DNA
gttcttaaacgccatctggttcta

SEQ ID NO: 8477 - DNA, 24 bp, synthetic construct
  misc_feature 1..24: note = Synthetic
  source 1..24: mol_type = other DNA
gacaccggaatgactcgcacgtta

SEQ ID NO: 8478 - DNA, 24 bp, synthetic construct
  misc_feature 1..24: note = Synthetic
  source 1..24: mol_type = other DNA
ttatgctgaacaataatgtctgcc

SEQ ID NO: 8479 - DNA, 24 bp, synthetic construct
  misc_feature 1..24: note = Synthetic
  source 1..24: mol_type = other DNA
gctatcgattgagttcgggaggcc

SEQ ID NO: 8480 - DNA, 24 bp, synthetic construct
  misc_feature 1..24: note = Synthetic
  source 1..24: mol_type = other DNA
cttagtcatgagctgttgcttgta

SEQ ID NO: 8481 - DNA, 24 bp, synthetic construct
  misc_feature 1..24: note = Synthetic
  source 1..24: mol_type = other DNA
ttctagacacggatgacctgaaca

SEQ ID NO: 8482 - DNA, 24 bp, synthetic construct
  misc_feature 1..24: note = Synthetic
  source 1..24: mol_type = other DNA
gagtgtgggccgcctggtgcgctg

SEQ ID NO: 8483 - DNA, 24 bp, synthetic construct
  misc_feature 1..24: note = Synthetic
  source 1..24: mol_type = other DNA
ccttcaagactttaagtggcgtcg

SEQ ID NO: 8484 - DNA, 24 bp, synthetic construct
  misc_feature 1..24: note = Synthetic
  source 1..24: mol_type = other DNA
tccgtaatctgcggtgacttcttg

SEQ ID NO: 8485 - DNA, 24 bp, synthetic construct
  misc_feature 1..24: note = Synthetic
  source 1..24: mol_type = other DNA
taatcatcgtgcagacaacgcttg

SEQ ID NO: 8486 - DNA, 24 bp, synthetic construct
  misc_feature 1..24: note = Synthetic
  source 1..24: mol_type = other DNA
tgtaatctgggaaaccggtacgcc

SEQ ID NO: 8487 - DNA, 24 bp, synthetic construct
  misc_feature 1..24: note = Synthetic
  source 1..24: mol_type = other DNA
ccgattagtgacaccgttgccgat

SEQ ID NO: 8488 - DNA, 24 bp, synthetic construct
  misc_feature 1..24: note = Synthetic
  source 1..24: mol_type = other DNA
ctgcaaatactatgcggttccacc

SEQ ID NO: 8489 - DNA, 24 bp, synthetic construct
  misc_feature 1..24: note = Synthetic
  source 1..24: mol_type = other DNA
ggtggagcatcatgagaggtagct

SEQ ID NO: 8490 - DNA, 24 bp, synthetic construct
  misc_feature 1..24: note = Synthetic
  source 1..24: mol_type = other DNA
aatccgattctccgccgcccgacc

SEQ ID NO: 8491 - DNA, 24 bp, synthetic construct
  misc_feature 1..24: note = Synthetic
  source 1..24: mol_type = other DNA
atatgtataccgatcgccgtggaa

SEQ ID NO: 8492 - DNA, 24 bp, synthetic construct
  misc_feature 1..24: note = Synthetic
  source 1..24: mol_type = other DNA
acgcgctggtcattcgccgggagc

SEQ ID NO: 8493 - DNA, 24 bp, synthetic construct
  misc_feature 1..24: note = Synthetic
  source 1..24: mol_type = other DNA
attataccgtaaggacatgaaacc

SEQ ID NO: 8494 - DNA, 24 bp, synthetic construct
  misc_feature 1..24: note = Synthetic
  source 1..24: mol_type = other DNA
gagaagaggtatatttggctcaca

SEQ ID NO: 8495 - DNA, 24 bp, synthetic construct
  misc_feature 1..24: note = Synthetic
  source 1..24: mol_type = other DNA
tcagttggagcctgagtgttagtt

SEQ ID NO: 8496 - DNA, 24 bp, synthetic construct
  misc_feature 1..24: note = Synthetic
  source 1..24: mol_type = other DNA
gccgcagggcttcaactaagtgga

SEQ ID NO: 8497 - DNA, 24 bp, synthetic construct
  misc_feature 1..24: note = Synthetic
  source 1..24: mol_type = other DNA
gtcgctaccctcgtaacggcttgt

SEQ ID NO: 8498 - DNA, 24 bp, synthetic construct
  misc_feature 1..24: note = Synthetic
  source 1..24: mol_type = other DNA
agggccgcttccacacgggttaaa

SEQ ID NO: 8499 - DNA, 24 bp, synthetic construct
  misc_feature 1..24: note = Synthetic
  source 1..24: mol_type = other DNA
ggtgatacttacacacatcgggtt

SEQ ID NO: 8500 - DNA, 24 bp, synthetic construct
  misc_feature 1..24: note = Synthetic
  source 1..24: mol_type = other DNA
atgatcagatcttcccttccgggt

SEQ ID NO: 8501 - DNA, 24 bp, synthetic construct
  misc_feature 1..24: note = Synthetic
  source 1..24: mol_type = other DNA
ctccacgctgttgcgatgttggac

SEQ ID NO: 8502 - DNA, 24 bp, synthetic construct
  misc_feature 1..24: note = Synthetic
  source 1..24: mol_type = other DNA
ggccagccctgaacgaccacatac

SEQ ID NO: 8503 - DNA, 24 bp, synthetic construct
  misc_feature 1..24: note = Synthetic
  source 1..24: mol_type = other DNA
aaatcggtgaactgcagagcgttg

SEQ ID NO: 8504 - DNA, 24 bp, synthetic construct
  misc_feature 1..24: note = Synthetic
  source 1..24: mol_type = other DNA
cgtttccgatccgaatggcggcta

SEQ ID NO: 8505 - DNA, 24 bp, synthetic construct
  misc_feature 1..24: note = Synthetic
  source 1..24: mol_type = other DNA
tttcatattactaggatcatgact

SEQ ID NO: 8506 - DNA, 24 bp, synthetic construct
  misc_feature 1..24: note = Synthetic
  source 1..24: mol_type = other DNA
atacttcgagaggaaattcttggg

SEQ ID NO: 8507 - DNA, 24 bp, synthetic construct
  misc_feature 1..24: note = Synthetic
  source 1..24: mol_type = other DNA
aaagaagcggagggatggtaagtt

SEQ ID NO: 8508 - DNA, 24 bp, synthetic construct
  misc_feature 1..24: note = Synthetic
  source 1..24: mol_type = other DNA
ggtatgactgaggtgaggctaccc

SEQ ID NO: 8509 - DNA, 24 bp, synthetic construct
  misc_feature 1..24: note = Synthetic
  source 1..24: mol_type = other DNA
aacccgcgatgacctgcccgagcg

SEQ ID NO: 8510 - DNA, 24 bp, synthetic construct
  misc_feature 1..24: note = Synthetic
  source 1..24: mol_type = other DNA
tggcggaactgccggatgtaccac

SEQ ID NO: 8511 - DNA, 24 bp, synthetic construct
  misc_feature 1..24: note = Synthetic
  source 1..24: mol_type = other DNA
ctctacatgcccggtcggcgttag

SEQ ID NO: 8512 - DNA, 24 bp, synthetic construct
  misc_feature 1..24: note = Synthetic
  source 1..24: mol_type = other DNA
ccatcggtttgctcactactctaa

SEQ ID NO: 8513 - DNA, 24 bp, synthetic construct
  misc_feature 1..24: note = Synthetic
  source 1..24: mol_type = other DNA
ccacgtgataacgtcttctaaata

SEQ ID NO: 8514 - DNA, 24 bp, synthetic construct
  misc_feature 1..24: note = Synthetic
  source 1..24: mol_type = other DNA
aggcaactagcggaagccgcggac

SEQ ID NO: 8515 - DNA, 24 bp, synthetic construct
  misc_feature 1..24: note = Synthetic
  source 1..24: mol_type = other DNA
gagcaatggagtcactgttcggca

SEQ ID NO: 8516 - DNA, 24 bp, synthetic construct
  misc_feature 1..24: note = Synthetic
  source 1..24: mol_type = other DNA
ccttcaacccgagatgacgtcccg

SEQ ID NO: 8517 - DNA, 24 bp, synthetic construct
  misc_feature 1..24: note = Synthetic
  source 1..24: mol_type = other DNA
agcccgacagccaatggatagtcc

SEQ ID NO: 8518 - DNA, 24 bp, synthetic construct
  misc_feature 1..24: note = Synthetic
  source 1..24: mol_type = other DNA
aagctgtccttgcggactcttcct

SEQ ID NO: 8519 - DNA, 24 bp, synthetic construct
  misc_feature 1..24: note = Synthetic
  source 1..24: mol_type = other DNA
tcgatgccatgttgtctcggatac

SEQ ID NO: 8520 - DNA, 24 bp, synthetic construct
  misc_feature 1..24: note = Synthetic
  source 1..24: mol_type = other DNA
ccatttgaccctaatggcttgata

SEQ ID NO: 8521 - DNA, 24 bp, synthetic construct
  misc_feature 1..24: note = Synthetic
  source 1..24: mol_type = other DNA
tcatacactagaggaatgtatcga

SEQ ID NO: 8522 - DNA, 24 bp, synthetic construct
  misc_feature 1..24: note = Synthetic
  source 1..24: mol_type = other DNA
tgttgttactcctaagacgtatct

SEQ ID NO: 8523 - DNA, 24 bp, synthetic construct
  misc_feature 1..24: note = Synthetic
  source 1..24: mol_type = other DNA
cacatttctcggcccttccgacta

SEQ ID NO: 8524 - DNA, 24 bp, synthetic construct
  misc_feature 1..24: note = Synthetic
  source 1..24: mol_type = other DNA
actggcatacacccaagtctaaac

SEQ ID NO: 8525 - DNA, 24 bp, synthetic construct
  misc_feature 1..24: note = Synthetic
  source 1..24: mol_type = other DNA
acgaattaatatgtgaacagattc

SEQ ID NO: 8526 - DNA, 24 bp, synthetic construct
  misc_feature 1..24: note = Synthetic
  source 1..24: mol_type = other DNA
tccggtcgaattgaagaacaccat

SEQ ID NO: 8527 - DNA, 24 bp, synthetic construct
  misc_feature 1..24: note = Synthetic
  source 1..24: mol_type = other DNA
tagcatcgtcaatattgcctcact

SEQ ID NO: 8528 - DNA, 24 bp, synthetic construct
  misc_feature 1..24: note = Synthetic
  source 1..24: mol_type = other DNA
ccggcgatttctacacttggttac

SEQ ID NO: 8529 - DNA, 24 bp, synthetic construct
  misc_feature 1..24: note = Synthetic
  source 1..24: mol_type = other DNA
aacgctttacttactggagattca

SEQ ID NO: 8530 - DNA, 24 bp, synthetic construct
  misc_feature 1..24: note = Synthetic
  source 1..24: mol_type = other DNA
caacagctccacccagttatcttg

SEQ ID NO: 8531 - DNA, 24 bp, synthetic construct
  misc_feature 1..24: note = Synthetic
  source 1..24: mol_type = other DNA
gaagagacggaccttgcgtgctac

SEQ ID NO: 8532 - DNA, 24 bp, synthetic construct
  misc_feature 1..24: note = Synthetic
  source 1..24: mol_type = other DNA
cgtcgcattactcgcctgcataag

SEQ ID NO: 8533 - DNA, 24 bp, synthetic construct
  misc_feature 1..24: note = Synthetic
  source 1..24: mol_type = other DNA
actagcgtaaagcgattagagtgt

SEQ ID NO: 8534 - DNA, 24 bp, synthetic construct
  misc_feature 1..24: note = Synthetic
  source 1..24: mol_type = other DNA
gaaccctttacgacgctacgcacc

SEQ ID NO: 8535 - DNA, 24 bp, synthetic construct
  misc_feature 1..24: note = Synthetic
  source 1..24: mol_type = other DNA
gcgaatgaaccgattagtcattcg

SEQ ID NO: 8536 - DNA, 24 bp, synthetic construct
  misc_feature 1..24: note = Synthetic
  source 1..24: mol_type = other DNA
tgcttaatatgccgagcctcgtat

SEQ ID NO: 8537 - DNA, 24 bp, synthetic construct
  misc_feature 1..24: note = Synthetic
  source 1..24: mol_type = other DNA
ggcaagattataccacatcttcct

SEQ ID NO: 8538 - DNA, 24 bp, synthetic construct
  misc_feature 1..24: note = Synthetic
  source 1..24: mol_type = other DNA
tttcgggacgacatccgtcccgag

SEQ ID NO: 8539 - DNA, 24 bp, synthetic construct
  misc_feature 1..24: note = Synthetic
  source 1..24: mol_type = other DNA
ttagcgttgacatacgtattcgta

SEQ ID NO: 8540 - DNA, 24 bp, synthetic construct
  misc_feature 1..24: note = Synthetic
  source 1..24: mol_type = other DNA
ctgggagctactgcaaagcctatt

SEQ ID NO: 8541 - DNA, 24 bp, synthetic construct
  misc_feature 1..24: note = Synthetic
  source 1..24: mol_type = other DNA
tgacaagttggtgtctagaaggcg

SEQ ID NO: 8542 - DNA, 24 bp, synthetic construct
  misc_feature 1..24: note = Synthetic
  source 1..24: mol_type = other DNA
gttgccaatattgatgatcgcttt

SEQ ID NO: 8543 - DNA, 24 bp, synthetic construct
  misc_feature 1..24: note = Synthetic
  source 1..24: mol_type = other DNA
gttgttatcgaccttggcacattc

SEQ ID NO: 8544 - DNA, 24 bp, synthetic construct
  misc_feature 1..24: note = Synthetic
  source 1..24: mol_type = other DNA
ccgcctacgctcgcatgtgtatca

SEQ ID NO: 8545 - DNA, 24 bp, synthetic construct
  misc_feature 1..24: note = Synthetic
  source 1..24: mol_type = other DNA
cagagccttggcttacgtgaacgc

SEQ ID NO: 8546 - DNA, 24 bp, synthetic construct
  misc_feature 1..24: note = Synthetic
  source 1..24: mol_type = other DNA
ctatagcgccaaactcggcgtcac

SEQ ID NO: 8547 - DNA, 24 bp, synthetic construct
  misc_feature 1..24: note = Synthetic
  source 1..24: mol_type = other DNA
aaatgcctattggctcttctactc

SEQ ID NO: 8548 - DNA, 24 bp, synthetic construct
  misc_feature 1..24: note = Synthetic
  source 1..24: mol_type = other DNA
gaagtacatactgatgtgataggc

SEQ ID NO: 8549 - DNA, 24 bp, synthetic construct
  misc_feature 1..24: note = Synthetic
  source 1..24: mol_type = other DNA
aataatgtccaatagcggagcgag

SEQ ID NO: 8550 - DNA, 24 bp, synthetic construct
  misc_feature 1..24: note = Synthetic
  source 1..24: mol_type = other DNA
tacatcaaaccatcacctgtttcc

SEQ ID NO: 8551 - DNA, 24 bp, synthetic construct
  misc_feature 1..24: note = Synthetic
  source 1..24: mol_type = other DNA
ttctaacaagcataaatgagctat

SEQ ID NO: 8552 - DNA, 24 bp, synthetic construct
  misc_feature 1..24: note = Synthetic
  source 1..24: mol_type = other DNA
agtcaagaattgtatcgacttaat

SEQ ID NO: 8553 - DNA, 24 bp, synthetic construct
  misc_feature 1..24: note = Synthetic
  source 1..24: mol_type = other DNA
gaactaagaaccaagaaatggacc

SEQ ID NO: 8554 - DNA, 24 bp, synthetic construct
  misc_feature 1..24: note = Synthetic
  source 1..24: mol_type = other DNA
ggtttggtgacctcaatggtgctt

SEQ ID NO: 8555 - DNA, 24 bp, synthetic construct
  misc_feature 1..24: note = Synthetic
  source 1..24: mol_type = other DNA
aagtaacggctcgtgggaagtgtc

SEQ ID NO: 8556 - DNA, 24 bp, synthetic construct
  misc_feature 1..24: note = Synthetic
  source 1..24: mol_type = other DNA
gaccgctcggacccgctacggtag

SEQ ID NO: 8557 - DNA, 24 bp, synthetic construct
  misc_feature 1..24: note = Synthetic
  source 1..24: mol_type = other DNA
acgttgagaacttacagacacaac

SEQ ID NO: 8558 - DNA, 24 bp, synthetic construct
  misc_feature 1..24: note = Synthetic
  source 1..24: mol_type = other DNA
gtatgaatctttgctcttctacag

SEQ ID NO: 8559 - DNA, 24 bp, synthetic construct
  misc_feature 1..24: note = Synthetic
  source 1..24: mol_type = other DNA
ttcattcagcacataatcagcata

SEQ ID NO: 8560 - DNA, 24 bp, synthetic construct
  misc_feature 1..24: note = Synthetic
  source 1..24: mol_type = other DNA
cggtattgccattaccgatcctat

SEQ ID NO: 8561 - DNA, 24 bp, synthetic construct
  misc_feature 1..24: note = Synthetic
  source 1..24: mol_type = other DNA
agcgacgttcattggtgtccgtaa

SEQ ID NO: 8562 - DNA, 24 bp, synthetic construct
  misc_feature 1..24: note = Synthetic
  source 1..24: mol_type = other DNA
aatactgtacctcgtaccgtcggt

SEQ ID NO: 8563 - DNA, 24 bp, synthetic construct
  misc_feature 1..24: note = Synthetic
  source 1..24: mol_type = other DNA
gctgtgcagattgtgcttgtccca

SEQ ID NO: 8564 - DNA, 24 bp, synthetic construct
  misc_feature 1..24: note = Synthetic
  source 1..24: mol_type = other DNA
acccgtaggatcgttgccgagctc

SEQ ID NO: 8565 - DNA, 24 bp, synthetic construct
  misc_feature 1..24: note = Synthetic
  source 1..24: mol_type = other DNA
gtttgtatataccatttctttggc

SEQ ID NO: 8566 - DNA, 24 bp, synthetic construct
  misc_feature 1..24: note = Synthetic
  source 1..24: mol_type = other DNA
gatttcggaggatcctctgtgtga

SEQ ID NO: 8567 - DNA, 24 bp, synthetic construct
  misc_feature 1..24: note = Synthetic
  source 1..24: mol_type = other DNA
gccgctgcgcgtcactccatctac

SEQ ID NO: 8568 - DNA, 24 bp, synthetic construct
  misc_feature 1..24: note = Synthetic
  source 1..24: mol_type = other DNA
ggtgatcttggaggctcggtttga

SEQ ID NO: 8569 - DNA, 24 bp, synthetic construct
  misc_feature 1..24: note = Synthetic
  source 1..24: mol_type = other DNA
gatacgctccgttgctcgcttatc

SEQ ID NO: 8570 - DNA, 24 bp, synthetic construct
  misc_feature 1..24: note = Synthetic
  source 1..24: mol_type = other DNA
aatttaaccattaaactcgcatcc

SEQ ID NO: 8571 - DNA, 24 bp, synthetic construct
  misc_feature 1..24: note = Synthetic
  source 1..24: mol_type = other DNA
gctgcggcttcgatcacgggtttg

SEQ ID NO: 8572 - DNA, 24 bp, synthetic construct
  misc_feature 1..24: note = Synthetic
  source 1..24: mol_type = other DNA
gtgcccagcaaacgcgcaggcgta

SEQ ID NO: 8573 - DNA, 24 bp, synthetic construct
  misc_feature 1..24: note = Synthetic
  source 1..24: mol_type = other DNA
aaaggcgccgtgagtagtgtagct

SEQ ID NO: 8574 - DNA, 24 bp, synthetic construct
  misc_feature 1..24: note = Synthetic
  source 1..24: mol_type = other DNA
ttgaagtaccttatatgctatatc

SEQ ID NO: 8575 - DNA, 24 bp, synthetic construct
  misc_feature 1..24: note = Synthetic
  source 1..24: mol_type = other DNA
aacctgacttcgtacgatcctgtt

SEQ ID NO: 8576 - DNA, 24 bp, synthetic construct
  misc_feature 1..24: note = Synthetic
  source 1..24: mol_type = other DNA
gttgcacgccgcaatggatatgac

SEQ ID NO: 8577 - DNA, 24 bp, synthetic construct
  misc_feature 1..24: note = Synthetic
  source 1..24: mol_type = other DNA
gcgaactcgaactttcgagtgcta

SEQ ID NO: 8578 - DNA, 24 bp, synthetic construct
  misc_feature 1..24: note = Synthetic
  source 1..24: mol_type = other DNA
acgtgttgagcgaactattgtgtg

SEQ ID NO: 8579 - DNA, 24 bp, synthetic construct
  misc_feature 1..24: note = Synthetic
  source 1..24: mol_type = other DNA
atttcgaagctcaattaccacttt

SEQ ID NO: 8580 - DNA, 24 bp, synthetic construct
  misc_feature 1..24: note = Synthetic
  source 1..24: mol_type = other DNA
gtgtgttcagctaagatacggact

SEQ ID NO: 8581 - DNA, 24 bp, synthetic construct
  misc_feature 1..24: note = Synthetic
  source 1..24: mol_type = other DNA
ccaatatctgtgcctctctctaaa

SEQ ID NO: 8582 - DNA, 24 bp, synthetic construct
  misc_feature 1..24: note = Synthetic
  source 1..24: mol_type = other DNA
ggccggatttaactcagtggctcg

SEQ ID NO: 8583 - DNA, 24 bp, synthetic construct
  misc_feature 1..24: note = Synthetic
  source 1..24: mol_type = other DNA
gttcgcccttaatgcacgtctcgt

SEQ ID NO: 8584 - DNA, 24 bp, synthetic construct
  misc_feature 1..24: note = Synthetic
  source 1..24: mol_type = other DNA
ccaccggccattgaagggtccata

SEQ ID NO: 8585 - DNA, 24 bp, synthetic construct
  misc_feature 1..24: note = Synthetic
  source 1..24: mol_type = other DNA
tctgtgcgttgacgcgagcacaag

SEQ ID NO: 8586 - DNA, 24 bp, synthetic construct
  misc_feature 1..24: note = Synthetic
  source 1..24: mol_type = other DNA
ttggacccaaactgcgattcactc

SEQ ID NO: 8587 - DNA, 24 bp, synthetic construct
  misc_feature 1..24: note = Synthetic
  source 1..24: mol_type = other DNA
acgccctgacgctgcaaggatttg

SEQ ID NO: 8588 - DNA, 24 bp, synthetic construct
  misc_feature 1..24: note = Synthetic
  source 1..24: mol_type = other DNA
tgttcgtcgtgagaagtgtccggt

SEQ ID NO: 8589 - DNA, 24 bp, synthetic construct
  misc_feature 1..24: note = Synthetic
  source 1..24: mol_type = other DNA
ccgaattgttgacaaagggcggtc

SEQ ID NO: 8590 - DNA, 24 bp, synthetic construct
  misc_feature 1..24: note = Synthetic
  source 1..24: mol_type = other DNA
ccatcacggactagctccaatgat

SEQ ID NO: 8591 - DNA, 24 bp, synthetic construct
  misc_feature 1..24: note = Synthetic
  source 1..24: mol_type = other DNA
tgtctctagtcgaataattaacag

SEQ ID NO: 8592 - DNA, 24 bp, synthetic construct
  misc_feature 1..24: note = Synthetic
  source 1..24: mol_type = other DNA
caccaacccatcatactactatcg

SEQ ID NO: 8593 - DNA, 24 bp, synthetic construct
  misc_feature 1..24: note = Synthetic
  source 1..24: mol_type = other DNA
cttaaacaccgggcctatccattc

SEQ ID NO: 8594 - DNA, 24 bp, synthetic construct
  misc_feature 1..24: note = Synthetic
  source 1..24: mol_type = other DNA
acaacggtgtgaagacacgtgagc

SEQ ID NO: 8595 - DNA, 24 bp, synthetic construct
  misc_feature 1..24: note = Synthetic
  source 1..24: mol_type = other DNA
gggtgccgtgggaagatgaaacga

SEQ ID NO: 8596 - DNA, 24 bp, synthetic construct
  misc_feature 1..24: note = Synthetic
  source 1..24: mol_type = other DNA
cgaacaacctctgcacacatctgg

SEQ ID NO: 8597 - DNA, 24 bp, synthetic construct
  misc_feature 1..24: note = Synthetic
  source 1..24: mol_type = other DNA
cgggtggcctgggtcccttcgagt

SEQ ID NO: 8598 - DNA, 24 bp, synthetic construct
  misc_feature 1..24: note = Synthetic
  source 1..24: mol_type = other DNA
aagttaccagaaggctcacatcct

SEQ ID NO: 8599 - DNA, 24 bp, synthetic construct
  misc_feature 1..24: note = Synthetic
  source 1..24: mol_type = other DNA
tccagagccttcacgacgatcagt

SEQ ID NO: 8600 - DNA, 24 bp, synthetic construct
  misc_feature 1..24: note = Synthetic
  source 1..24: mol_type = other DNA
gagggaggtcaggctagacccata

SEQ ID NO: 8601 - DNA, 24 bp, synthetic construct
  misc_feature 1..24: note = Synthetic
  source 1..24: mol_type = other DNA
acgctcatatgcggacccaccttc

SEQ ID NO: 8602 - DNA, 24 bp, synthetic construct
  misc_feature 1..24: note = Synthetic
  source 1..24: mol_type = other DNA
tattgtacgtatactcctggaagt

SEQ ID NO: 8603 - DNA, 24 bp, synthetic construct
  misc_feature 1..24: note = Synthetic
  source 1..24: mol_type = other DNA
actatgtctcggtggaccatatta

SEQ ID NO: 8604 - DNA, 24 bp, synthetic construct
  misc_feature 1..24: note = Synthetic
  source 1..24: mol_type = other DNA
ggcccattgcgaggcccagctgta

SEQ ID NO: 8605 - DNA, 24 bp, synthetic construct
  misc_feature 1..24: note = Synthetic
  source 1..24: mol_type = other DNA
taacacagccaagcacggtggtga

SEQ ID NO: 8606 - DNA, 24 bp, synthetic construct
  misc_feature 1..24: note = Synthetic
  source 1..24: mol_type = other DNA
tatgagtataggtggaactcatcg

SEQ ID NO: 8607 - DNA, 24 bp, synthetic construct
  misc_feature 1..24: note = Synthetic
  source 1..24: mol_type = other DNA
cggctcgatgctcgccacaggagg

SEQ ID NO: 8608 - DNA, 24 bp, synthetic construct
  misc_feature 1..24: note = Synthetic
  source 1..24: mol_type = other DNA
atgatttatcgataatacgagaac

SEQ ID NO: 8609 - DNA, 24 bp, synthetic construct
  misc_feature 1..24: note = Synthetic
  source 1..24: mol_type = other DNA
taatgctttgagtctgggtgtgac

SEQ ID NO: 8610 - DNA, 24 bp, synthetic construct
  misc_feature 1..24: note = Synthetic
  source 1..24: mol_type = other DNA
ggtcgccctcggaagtcaagctta

SEQ ID NO: 8611 - DNA, 24 bp, synthetic construct
  misc_feature 1..24: note = Synthetic
  source 1..24: mol_type = other DNA
tgctcactcataagtgttatcaac

SEQ ID NO: 8612 - DNA, 24 bp, synthetic construct
  misc_feature 1..24: note = Synthetic
  source 1..24: mol_type = other DNA
cgccaatgcttctttggctagtac

SEQ ID NO: 8613 - DNA, 24 bp, synthetic construct
  misc_feature 1..24: note = Synthetic
  source 1..24: mol_type = other DNA
tcattcacctctcggtcaacatag

SEQ ID NO: 8614 - DNA, 24 bp, synthetic construct
  misc_feature 1..24: note = Synthetic
  source 1..24: mol_type = other DNA
catggtggtggcccgcctgtatca

SEQ ID NO: 8615 - DNA, 24 bp, synthetic construct
  misc_feature 1..24: note = Synthetic
  source 1..24: mol_type = other DNA
gtgtcctaaccatttgcgttgaca

SEQ ID NO: 8616 - DNA, 24 bp, synthetic construct
  misc_feature 1..24: note = Synthetic
  source 1..24: mol_type = other DNA
gtcaacagattcgctacccgacga

SEQ ID NO: 8617 - DNA, 24 bp, synthetic construct
  misc_feature 1..24: note = Synthetic
  source 1..24: mol_type = other DNA
ctgatgactcctgttggtctacgc

SEQ ID NO: 8618 - DNA, 24 bp, synthetic construct
  misc_feature 1..24: note = Synthetic
  source 1..24: mol_type = other DNA
agagggagtatgttatcctcgcgt

SEQ ID NO: 8619 - DNA, 24 bp, synthetic construct
  misc_feature 1..24: note = Synthetic
  source 1..24: mol_type = other DNA
aatctcagtcttagtcggcggaga

SEQ ID NO: 8620 - DNA, 24 bp, synthetic construct
  misc_feature 1..24: note = Synthetic
  source 1..24: mol_type = other DNA
tgttaccactgtcgagggtaacgc

SEQ ID NO: 8621 - DNA, 24 bp, synthetic construct
  misc_feature 1..24: note = Synthetic
  source 1..24: mol_type = other DNA
gccatggagcgtaccggaggttcc

SEQ ID NO: 8622 - DNA, 24 bp, synthetic construct
  misc_feature 1..24: note = Synthetic
  source 1..24: mol_type = other DNA
gccctttgttggaagttagaattt

SEQ ID NO: 8623 - DNA, 24 bp, synthetic construct
  misc_feature 1..24: note = Synthetic
  source 1..24: mol_type = other DNA
atatcaaacttcaccaacaacgtc

SEQ ID NO: 8624 - DNA, 24 bp, synthetic construct
  misc_feature 1..24: note = Synthetic
  source 1..24: mol_type = other DNA
caactagttgtttcaagcaaacga

SEQ ID NO: 8625 - DNA, 24 bp, synthetic construct
  misc_feature 1..24: note = Synthetic
  source 1..24: mol_type = other DNA
cagcttaagtgtgacattgagtcc

SEQ ID NO: 8626 - DNA, 24 bp, synthetic construct
  misc_feature 1..24: note = Synthetic
  source 1..24: mol_type = other DNA
ggcagtggtacgacacgcacaaga

SEQ ID NO: 8627 - DNA, 24 bp, synthetic construct
  misc_feature 1..24: note = Synthetic
  source 1..24: mol_type = other DNA
cattggacaatccagcgtccttat

SEQ ID NO: 8628 - DNA, 24 bp, synthetic construct
  misc_feature 1..24: note = Synthetic
  source 1..24: mol_type = other DNA
tgcggtgagaggtatcttcattgc

SEQ ID NO: 8629 - DNA, 24 bp, synthetic construct
  misc_feature 1..24: note = Synthetic
  source 1..24: mol_type = other DNA
gccctccggaaagggactgtgtgt

SEQ ID NO: 8630 - DNA, 24 bp, synthetic construct
  misc_feature 1..24: note = Synthetic
  source 1..24: mol_type = other DNA
aaactaacttcgggcgcgtctcga

SEQ ID NO: 8631 - DNA, 24 bp, synthetic construct
  misc_feature 1..24: note = Synthetic
  source 1..24: mol_type = other DNA
aacacagggccttgtctggctccc

SEQ ID NO: 8632 - DNA, 24 bp, synthetic construct
  misc_feature 1..24: note = Synthetic
  source 1..24: mol_type = other DNA
aaagaaactcttctagtagcaagc

SEQ ID NO: 8633 - DNA, 24 bp, synthetic construct
  misc_feature 1..24: note = Synthetic
  source 1..24: mol_type = other DNA
tatgtacattgaccgctactatga

SEQ ID NO: 8634 - DNA, 24 bp, synthetic construct
  misc_feature 1..24: note = Synthetic
  source 1..24: mol_type = other DNA
agtttagagtattaaccgcatgta

SEQ ID NO: 8635 - DNA, 24 bp, synthetic construct
  misc_feature 1..24: note = Synthetic
  source 1..24: mol_type = other DNA
gataaactcccgggtttctccacc

SEQ ID NO: 8636 - DNA, 24 bp, synthetic construct
  misc_feature 1..24: note = Synthetic
  source 1..24: mol_type = other DNA
ggagaagtcgtttagcggcctaca

SEQ ID NO: 8637 - DNA, 24 bp, synthetic construct
  misc_feature 1..24: note = Synthetic
  source 1..24: mol_type = other DNA
caatcaaggcggtcgcctcgtttg

SEQ ID NO: 8638 - DNA, 24 bp, synthetic construct
  misc_feature 1..24: note = Synthetic
  source 1..24: mol_type = other DNA
gaacggccgttgcgtggtctgctg

SEQ ID NO: 8639 - DNA, 24 bp, synthetic construct
  misc_feature 1..24: note = Synthetic
  source 1..24: mol_type = other DNA
cgtcatttgataagatgaagtcac

SEQ ID NO: 8640 - DNA, 24 bp, synthetic construct
  misc_feature 1..24: note = Synthetic
  source 1..24: mol_type = other DNA
gtgctctttggagacacgctcaat

SEQ ID NO: 8641 - DNA, 24 bp, synthetic construct
  misc_feature 1..24: note = Synthetic
  source 1..24: mol_type = other DNA
taccctctgagttcgcagaaaggt

SEQ ID NO: 8642 - DNA, 24 bp, synthetic construct
  misc_feature 1..24: note = Synthetic
  source 1..24: mol_type = other DNA
gttgaaagccacgaacgaattata

SEQ ID NO: 8643 - DNA, 24 bp, synthetic construct
  misc_feature 1..24: note = Synthetic
  source 1..24: mol_type = other DNA
ccttgataaggaaatagcggtggc

SEQ ID NO: 8644 - DNA, 24 bp, synthetic construct
  misc_feature 1..24: note = Synthetic
  source 1..24: mol_type = other DNA
ggcggcaactgatagtgccaatcg

SEQ ID NO: 8645 - DNA, 24 bp, synthetic construct
  misc_feature 1..24: note = Synthetic
  source 1..24: mol_type = other DNA
tgggtttgcatttgtcgccgacct

SEQ ID NO: 8646 - DNA, 24 bp, synthetic construct
  misc_feature 1..24: note = Synthetic
  source 1..24: mol_type = other DNA
ataagcaaccagcccttcgtggca

SEQ ID NO: 8647 - DNA, 24 bp, synthetic construct
  misc_feature 1..24: note = Synthetic
  source 1..24: mol_type = other DNA
cacgtaagctcaatggattacgct

SEQ ID NO: 8648 - DNA, 24 bp, synthetic construct
  misc_feature 1..24: note = Synthetic
  source 1..24: mol_type = other DNA
caggtcaggaccttcctcctacat

SEQ ID NO: 8649 - DNA, 24 bp, synthetic construct
  misc_feature 1..24: note = Synthetic
  source 1..24: mol_type = other DNA
atgacctcggcgttctgtccacac

SEQ ID NO: 8650 - DNA, 24 bp, synthetic construct
  misc_feature 1..24: note = Synthetic
  source 1..24: mol_type = other DNA
tagagacggtgccgcacggcgtta

SEQ ID NO: 8651 - DNA, 24 bp, synthetic construct
  misc_feature 1..24: note = Synthetic
  source 1..24: mol_type = other DNA
cactcgtgaggagcctaaggattc

SEQ ID NO: 8652 - DNA, 24 bp, synthetic construct
  misc_feature 1..24: note = Synthetic
  source 1..24: mol_type = other DNA
caaatgatatccgcgtaaagggcc

SEQ ID NO: 8653 - DNA, 24 bp, synthetic construct
  misc_feature 1..24: note = Synthetic
  source 1..24: mol_type = other DNA
gggtccgcaacccagggtaggaag

SEQ ID NO: 8654 - DNA, 24 bp, synthetic construct
  misc_feature 1..24: note = Synthetic
  source 1..24: mol_type = other DNA
cgctactacgcgcacttggactca

SEQ ID NO: 8655 - DNA, 24 bp, synthetic construct
  misc_feature 1..24: note = Synthetic
  source 1..24: mol_type = other DNA
tgaaattcatgcggaacgtggtgc

SEQ ID NO: 8656 - DNA, 24 bp, synthetic construct
  misc_feature 1..24: note = Synthetic
  source 1..24: mol_type = other DNA
cagcgagctcgagttgtagatctt

SEQ ID NO: 8657 - DNA, 24 bp, synthetic construct
  misc_feature 1..24: note = Synthetic
  source 1..24: mol_type = other DNA
tttcctcctcggtcgcatatatgt

SEQ ID NO: 8658 - DNA, 24 bp, synthetic construct
  misc_feature 1..24: note = Synthetic
  source 1..24: mol_type = other DNA
tagagatagcctccaaagtccttg

SEQ ID NO: 8659 - DNA, 24 bp, synthetic construct
  misc_feature 1..24: note = Synthetic
  source 1..24: mol_type = other DNA
ggtcaacctatattgcgattactg

SEQ ID NO: 8660 - DNA, 24 bp, synthetic construct
  misc_feature 1..24: note = Synthetic
  source 1..24: mol_type = other DNA
cgatgctaggcttatcgacaccac

SEQ ID NO: 8661 - DNA, 24 bp, synthetic construct
  misc_feature 1..24: note = Synthetic
  source 1..24: mol_type = other DNA
cgagagcctgtagacggagcactt

SEQ ID NO: 8662 - DNA, 24 bp, synthetic construct
  misc_feature 1..24: note = Synthetic
  source 1..24: mol_type = other DNA
ccagacctaagaggaatgacgctt

SEQ ID NO: 8663 - DNA, 24 bp, synthetic construct
  misc_feature 1..24: note = Synthetic
  source 1..24: mol_type = other DNA
attatagccaatatgtttgaactc

SEQ ID NO: 8664 - DNA, 24 bp, synthetic construct
  misc_feature 1..24: note = Synthetic
  source 1..24: mol_type = other DNA
gatatggatcccgttaatgcgcgg

SEQ ID NO: 8665 - DNA, 24 bp, synthetic construct
  misc_feature 1..24: note = Synthetic
  source 1..24: mol_type = other DNA
ttactagtgcgcagccatctaaac

SEQ ID NO: 8666 - DNA, 24 bp, synthetic construct
  misc_feature 1..24: note = Synthetic
  source 1..24: mol_type = other DNA
tagttaagtcgtaacgtatacaac

SEQ ID NO: 8667 - DNA, 24 bp, synthetic construct
  misc_feature 1..24: note = Synthetic
  source 1..24: mol_type = other DNA
gctaaagaatccgagcggcaaggt

SEQ ID NO: 8668 - DNA, 24 bp, synthetic construct
  misc_feature 1..24: note = Synthetic
  source 1..24: mol_type = other DNA
tgtgcactctatattaattaggct

SEQ ID NO: 8669 - DNA, 24 bp, synthetic construct
  misc_feature 1..24: note = Synthetic
  source 1..24: mol_type = other DNA
ttctagagttcgcatactagttga

SEQ ID NO: 8670 - DNA, 24 bp, synthetic construct
  misc_feature 1..24: note = Synthetic
  source 1..24: mol_type = other DNA
atgcatcctcgaacagttaccaca

SEQ ID NO: 8671 - DNA, 24 bp, synthetic construct
  misc_feature 1..24: note = Synthetic
  source 1..24: mol_type = other DNA
ctgaagagtgatcaattgcgacta

SEQ ID NO: 8672 - DNA, 24 bp, synthetic construct
  misc_feature 1..24: note = Synthetic
  source 1..24: mol_type = other DNA
ttcttgcataactctaagggtcgt

SEQ ID NO: 8673 - DNA, 24 bp, synthetic construct
  misc_feature 1..24: note = Synthetic
  source 1..24: mol_type = other DNA
gtatgtttgcggtatcatcaagca

SEQ ID NO: 8674 - DNA, 24 bp, synthetic construct
  misc_feature 1..24: note = Synthetic
  source 1..24: mol_type = other DNA
acttgcgttaaataggaaagccac

SEQ ID NO: 8675 - DNA, 24 bp, synthetic construct
  misc_feature 1..24: note = Synthetic
  source 1..24: mol_type = other DNA
tcaattatgaagttaaccacctat

SEQ ID NO: 8676 - DNA, 24 bp, synthetic construct
  misc_feature 1..24: note = Synthetic
  source 1..24: mol_type = other DNA
tcgaacatcgagacgataacaacc

SEQ ID NO: 8677 - DNA, 24 bp, synthetic construct
  misc_feature 1..24: note = Synthetic
  source 1..24: mol_type = other DNA
atgatcagtttcgcacgcaattat

SEQ ID NO: 8678 - DNA, 24 bp, synthetic construct
  misc_feature 1..24: note = Synthetic
  source 1..24: mol_type = other DNA
acaggtatagcacatgatgatgta

SEQ ID NO: 8679 - DNA, 24 bp, synthetic construct
  misc_feature 1..24: note = Synthetic
  source 1..24: mol_type = other DNA
aaggtgaagttgcgccaaacggct

SEQ ID NO: 8680 - DNA, 24 bp, synthetic construct
  misc_feature 1..24: note = Synthetic
  source 1..24: mol_type = other DNA
acttcaggttccttaaccgacaac

SEQ ID NO: 8681 - DNA, 24 bp, synthetic construct
  misc_feature 1..24: note = Synthetic
  source 1..24: mol_type = other DNA
accgcctctggattagtgaattaa

SEQ ID NO: 8682 - DNA, 24 bp, synthetic construct
  misc_feature 1..24: note = Synthetic
  source 1..24: mol_type = other DNA
caacaatagcggcaaggccgatgg

SEQ ID NO: 8683 - DNA, 24 bp, synthetic construct
  misc_feature 1..24: note = Synthetic
  source 1..24: mol_type = other DNA
caccattggcaggtaccgatacgt

SEQ ID NO: 8684 - DNA, 24 bp, synthetic construct
  misc_feature 1..24: note = Synthetic
  source 1..24: mol_type = other DNA
acgtccttccacggccataggtta

SEQ ID NO: 8685 - DNA, 24 bp, synthetic construct
  misc_feature 1..24: note = Synthetic
  source 1..24: mol_type = other DNA
tgttctgtctcacctacacaccga

SEQ ID NO: 8686 - DNA, 24 bp, synthetic construct
  misc_feature 1..24: note = Synthetic
  source 1..24: mol_type = other DNA
aggatcctatttccaatcgtgccg

SEQ ID NO: 8687 - DNA, 24 bp, synthetic construct
  misc_feature 1..24: note = Synthetic
  source 1..24: mol_type = other DNA
tccaagagatacgaatagacgatg

SEQ ID NO: 8688 - DNA, 24 bp, synthetic construct
  misc_feature 1..24: note = Synthetic
  source 1..24: mol_type = other DNA
acttgctactgacaccacaccaca

SEQ ID NO: 8689 - DNA, 24 bp, synthetic construct
  misc_feature 1..24: note = Synthetic
  source 1..24: mol_type = other DNA
agagtgccgtttccactcgcaata

SEQ ID NO: 8690 - DNA, 24 bp, synthetic construct
  misc_feature 1..24: note = Synthetic
  source 1..24: mol_type = other DNA
tgctcgcaagtgatttcccaggcc

SEQ ID NO: 8691 - DNA, 24 bp, synthetic construct
  misc_feature 1..24: note = Synthetic
  source 1..24: mol_type = other DNA
gaggcgtcgctgatgatgacgtct

SEQ ID NO: 8692 - DNA, 24 bp, synthetic construct
  misc_feature 1..24: note = Synthetic
  source 1..24: mol_type = other DNA
ccgtgctccgccgtctttggaaac

SEQ ID NO: 8693 - DNA, 24 bp, synthetic construct
  misc_feature 1..24: note = Synthetic
  source 1..24: mol_type = other DNA
accgggtccgcacccggcaatacc

SEQ ID NO: 8694 - DNA, 24 bp, synthetic construct
  misc_feature 1..24: note = Synthetic
  source 1..24: mol_type = other DNA
actaccgccgatgacgtacgcaga

SEQ ID NO: 8695 - DNA, 24 bp, synthetic construct
  misc_feature 1..24: note = Synthetic
  source 1..24: mol_type = other DNA
tagtctggctatgtcgaagactaa

SEQ ID NO: 8696 - DNA, 24 bp, synthetic construct
  misc_feature 1..24: note = Synthetic
  source 1..24: mol_type = other DNA
ttcttcacagatccgcgaacacat

SEQ ID NO: 8697 - DNA, 24 bp, synthetic construct
  misc_feature 1..24: note = Synthetic
  source 1..24: mol_type = other DNA
gaggcaacatcatcgcctcgacac

SEQ ID NO: 8698 - DNA, 24 bp, synthetic construct
  misc_feature 1..24: note = Synthetic
  source 1..24: mol_type = other DNA
tttgagagctgatttgctgttcgt

SEQ ID NO: 8699 - DNA, 24 bp, synthetic construct
  misc_feature 1..24: note = Synthetic
  source 1..24: mol_type = other DNA
ttatcgcgagtgactctacatacg

SEQ ID NO: 8700 - DNA, 24 bp, synthetic construct
  misc_feature 1..24: note = Synthetic
  source 1..24: mol_type = other DNA
gagggacaccctagtagagaaacg

SEQ ID NO: 8701 - DNA, 24 bp, synthetic construct
  misc_feature 1..24: note = Synthetic
  source 1..24: mol_type = other DNA
tacaaggcacacgtgtctcacgtc

SEQ ID NO: 8702 - DNA, 24 bp, synthetic construct
  misc_feature 1..24: note = Synthetic
  source 1..24: mol_type = other DNA
agggtcagggtgagaggacggaag

SEQ ID NO: 8703 - DNA, 24 bp, synthetic construct
  misc_feature 1..24: note = Synthetic
  source 1..24: mol_type = other DNA
gtgatgcggtgtctatagacataa

SEQ ID NO: 8704 - DNA, 24 bp, synthetic construct
  misc_feature 1..24: note = Synthetic
  source 1..24: mol_type = other DNA
tgtattggatcaccatgagatgtg

SEQ ID NO: 8705 - DNA, 24 bp, synthetic construct
  misc_feature 1..24: note = Synthetic
  source 1..24: mol_type = other DNA
aaaccctcttgtctaaagatgttg

SEQ ID NO: 8706 - DNA, 24 bp, synthetic construct
  misc_feature 1..24: note = Synthetic
  source 1..24: mol_type = other DNA
ttggtttcgttaggtactgtgcac

SEQ ID NO: 8707 - DNA, 24 bp, synthetic construct
  misc_feature 1..24: note = Synthetic
  source 1..24: mol_type = other DNA
taatcccgacatagcgaccacgga

SEQ ID NO: 8708 - DNA, 24 bp, synthetic construct
  misc_feature 1..24: note = Synthetic
  source 1..24: mol_type = other DNA
atattggaggcgaccgacttcaca

SEQ ID NO: 8709 - DNA, 24 bp, synthetic construct
  misc_feature 1..24: note = Synthetic
  source 1..24: mol_type = other DNA
caggattcctaacacgagcaccga

SEQ ID NO: 8710 - DNA, 24 bp, synthetic construct
  misc_feature 1..24: note = Synthetic
  source 1..24: mol_type = other DNA
gtgatgcctgtttcatggagtagt

SEQ ID NO: 8711 - DNA, 24 bp, synthetic construct
  misc_feature 1..24: note = Synthetic
  source 1..24: mol_type = other DNA
gatcccaaggtgagtttatagagg

SEQ ID NO: 8712 - DNA, 24 bp, synthetic construct
  misc_feature 1..24: note = Synthetic
  source 1..24: mol_type = other DNA
gggcccgcctgcccatataagggt

SEQ ID NO: 8713 - DNA, 24 bp, synthetic construct
  misc_feature 1..24: note = Synthetic
  source 1..24: mol_type = other DNA
tcccgctcgagtcgggcaccaggt

SEQ ID NO: 8714 - DNA, 24 bp, synthetic construct
  misc_feature 1..24: note = Synthetic
  source 1..24: mol_type = other DNA
cacagagtgtagtcaattaacgcc

SEQ ID NO: 8715 - DNA, 24 bp, synthetic construct
  misc_feature 1..24: note = Synthetic
  source 1..24: mol_type = other DNA
tttgctgtatgtctaaatcattag

SEQ ID NO: 8716 - DNA, 24 bp, synthetic construct
  misc_feature 1..24: note = Synthetic
  source 1..24: mol_type = other DNA
aaccgatgaccgcttatatgtacg

SEQ ID NO: 8717 - DNA, 24 bp, synthetic construct
  misc_feature 1..24: note = Synthetic
  source 1..24: mol_type = other DNA
ttcgcaccagaacagtgcgcgatt

SEQ ID NO: 8718 - DNA, 24 bp, synthetic construct
  misc_feature 1..24: note = Synthetic
  source 1..24: mol_type = other DNA
gatcggtactgggctgcactaaag

SEQ ID NO: 8719 - DNA, 24 bp, synthetic construct
  misc_feature 1..24: note = Synthetic
  source 1..24: mol_type = other DNA
atagttggagtataggtcgataac

SEQ ID NO: 8720 - DNA, 24 bp, synthetic construct
  misc_feature 1..24: note = Synthetic
  source 1..24: mol_type = other DNA
ggtgcccgcatagggcgctctgac

SEQ ID NO: 8721 - DNA, 24 bp, synthetic construct
  misc_feature 1..24: note = Synthetic
  source 1..24: mol_type = other DNA
atttcaaactgctctgctgatatc

SEQ ID NO: 8722 - DNA, 24 bp, synthetic construct
  misc_feature 1..24: note = Synthetic
  source 1..24: mol_type = other DNA
acacaatgtagagcagattggtta

SEQ ID NO: 8723 - DNA, 24 bp, synthetic construct
  misc_feature 1..24: note = Synthetic
  source 1..24: mol_type = other DNA
caaccgaggatttgcccattccgc

SEQ ID NO: 8724 - DNA, 24 bp, synthetic construct
  misc_feature 1..24: note = Synthetic
  source 1..24: mol_type = other DNA
ctcgttattggattcgtgaatcta

SEQ ID NO: 8725 - DNA, 24 bp, synthetic construct
  misc_feature 1..24: note = Synthetic
  source 1..24: mol_type = other DNA
tagccctgtcctaaccttatagac

SEQ ID NO: 8726 - DNA, 24 bp, synthetic construct
  misc_feature 1..24: note = Synthetic
  source 1..24: mol_type = other DNA
tagtcggcgcgtagctgcgggtag

SEQ ID NO: 8727 - DNA, 24 bp, synthetic construct
  misc_feature 1..24: note = Synthetic
  source 1..24: mol_type = other DNA
cggtgacctagcatccgttcttgc

SEQ ID NO: 8728 - DNA, 24 bp, synthetic construct
  misc_feature 1..24: note = Synthetic
  source 1..24: mol_type = other DNA
tttcctcagccaagaccattctat

SEQ ID NO: 8729 - DNA, 24 bp, synthetic construct
  misc_feature 1..24: note = Synthetic
  source 1..24: mol_type = other DNA
attaaacgggattccaaggccacg

SEQ ID NO: 8730 - DNA, 24 bp, synthetic construct
  misc_feature 1..24: note = Synthetic
  source 1..24: mol_type = other DNA
agcaagtcccgggaactgcaaagc

SEQ ID NO: 8731 - DNA, 24 bp, synthetic construct
  misc_feature 1..24: note = Synthetic
  source 1..24: mol_type = other DNA
gcgggcatgcgctaaggatcttga

SEQ ID NO: 8732 - DNA, 24 bp, synthetic construct
  misc_feature 1..24: note = Synthetic
  source 1..24: mol_type = other DNA
acggttctctaggctgcaagaccc

SEQ ID NO: 8733 - DNA, 24 bp, synthetic construct
  misc_feature 1..24: note = Synthetic
  source 1..24: mol_type = other DNA
ctaaaggattcaggatccgcttta

SEQ ID NO: 8734 - DNA, 24 bp, synthetic construct
  misc_feature 1..24: note = Synthetic
  source 1..24: mol_type = other DNA
aaatgcaatttgctccggtgtggc

SEQ ID NO: 8735 - DNA, 24 bp, synthetic construct
  misc_feature 1..24: note = Synthetic
  source 1..24: mol_type = other DNA
actgagactctcgaactcgggtct

SEQ ID NO: 8736 - DNA, 24 bp, synthetic construct
  misc_feature 1..24: note = Synthetic
  source 1..24: mol_type = other DNA
cccatgggtgtaatgccagaggtc

SEQ ID NO: 8737 - DNA, 24 bp, synthetic construct
  misc_feature 1..24: note = Synthetic
  source 1..24: mol_type = other DNA
acctgcgagattcttgaacgagaa

SEQ ID NO: 8738 - DNA, 24 bp, synthetic construct
  misc_feature 1..24: note = Synthetic
  source 1..24: mol_type = other DNA
gataaatgtgggcccagtatctga

SEQ ID NO: 8739 - DNA, 24 bp, synthetic construct
  misc_feature 1..24: note = Synthetic
  source 1..24: mol_type = other DNA
gctgggatggtagaacgtatggcc

SEQ ID NO: 8740 - DNA, 24 bp, synthetic construct
  misc_feature 1..24: note = Synthetic
  source 1..24: mol_type = other DNA
gcagccttactatcctaaggtctc

SEQ ID NO: 8741 - DNA, 24 bp, synthetic construct
  misc_feature 1..24: note = Synthetic
  source 1..24: mol_type = other DNA
agagcgtttaactccgcctttcgc

SEQ ID NO: 8742 - DNA, 24 bp, synthetic construct
  misc_feature 1..24: note = Synthetic
  source 1..24: mol_type = other DNA
ggagggctatatgacatgagtagc

SEQ ID NO: 8743 - DNA, 24 bp, synthetic construct
  misc_feature 1..24: note = Synthetic
  source 1..24: mol_type = other DNA
cgcaacacctttaccctcttaggg

SEQ ID NO: 8744 - DNA, 24 bp, synthetic construct
  misc_feature 1..24: note = Synthetic
  source 1..24: mol_type = other DNA
taagcattgaattacgactaggat

SEQ ID NO: 8745 - DNA, 24 bp, synthetic construct
  misc_feature 1..24: note = Synthetic
  source 1..24: mol_type = other DNA
tgaaacgtgccctgaagaatcata

SEQ ID NO: 8746 - DNA, 24 bp, synthetic construct
  misc_feature 1..24: note = Synthetic
  source 1..24: mol_type = other DNA
gggccgtcgttaagaaagacagac

SEQ ID NO: 8747 - DNA, 24 bp, synthetic construct
  misc_feature 1..24: note = Synthetic
  source 1..24: mol_type = other DNA
atatttgcggtgagatgagagcac

SEQ ID NO: 8748 - DNA, 24 bp, synthetic construct
  misc_feature 1..24: note = Synthetic
  source 1..24: mol_type = other DNA
gtcactcaagagtaggttggtggt

SEQ ID NO: 8749 - DNA, 24 bp, synthetic construct
  misc_feature 1..24: note = Synthetic
  source 1..24: mol_type = other DNA
tatcccacatggttctcgttcgcc

SEQ ID NO: 8750 - DNA, 24 bp, synthetic construct
  misc_feature 1..24: note = Synthetic
  source 1..24: mol_type = other DNA
gcaacgctgcgaggatgcgatcca

SEQ ID NO: 8751 - DNA, 24 bp, synthetic construct
  misc_feature 1..24: note = Synthetic
  source 1..24: mol_type = other DNA
ccagtctcgatcaatcgctcttgc

SEQ ID NO: 8752 - DNA, 24 bp, synthetic construct
  misc_feature 1..24: note = Synthetic
  source 1..24: mol_type = other DNA
ctccgtggaagagaacgccgaacg

SEQ ID NO: 8753 - DNA, 24 bp, synthetic construct
  misc_feature 1..24: note = Synthetic
  source 1..24: mol_type = other DNA
ccgacagagggaacgtggaaactg

SEQ ID NO: 8754 - DNA, 24 bp, synthetic construct
  misc_feature 1..24: note = Synthetic
  source 1..24: mol_type = other DNA
atgtcatgtctcacatgctgtcta

SEQ ID NO: 8755 - DNA, 24 bp, synthetic construct
  misc_feature 1..24: note = Synthetic
  source 1..24: mol_type = other DNA
tttaaatctattgaggttagtggc

SEQ ID NO: 8756 - DNA, 24 bp, synthetic construct
  misc_feature 1..24: note = Synthetic
  source 1..24: mol_type = other DNA
ggcgttaggcgaggaggtttgggc

SEQ ID NO: 8757 - DNA, 24 bp, synthetic construct
  misc_feature 1..24: note = Synthetic
  source 1..24: mol_type = other DNA
cgtagcggtggatctctaacttca

SEQ ID NO: 8758 - DNA, 24 bp, synthetic construct
  misc_feature 1..24: note = Synthetic
  source 1..24: mol_type = other DNA
ggtgactcgcgtgaacatatgaaa

SEQ ID NO: 8759 - DNA, 24 bp, synthetic construct
  misc_feature 1..24: note = Synthetic
  source 1..24: mol_type = other DNA
cagttgccacgtctctgcgtcgcg

SEQ ID NO: 8760 - DNA, 24 bp, synthetic construct
  misc_feature 1..24: note = Synthetic
  source 1..24: mol_type = other DNA
ggaaggttcaggcgatggttcggc

SEQ ID NO: 8761 - DNA, 24 bp, synthetic construct
  misc_feature 1..24: note = Synthetic
  source 1..24: mol_type = other DNA
ctctccggatacattgccgagaga

SEQ ID NO: 8762 - DNA, 24 bp, synthetic construct
  misc_feature 1..24: note = Synthetic
  source 1..24: mol_type = other DNA
agcgggaggagtaacgtagcgcag

SEQ ID NO: 8763 - DNA, 24 bp, synthetic construct
  misc_feature 1..24: note = Synthetic
  source 1..24: mol_type = other DNA
aggcagaatagttctaacgcggat

SEQ ID NO: 8764 - DNA, 24 bp, synthetic construct
  misc_feature 1..24: note = Synthetic
  source 1..24: mol_type = other DNA
tgggcgtgtagaactggattcgat

SEQ ID NO: 8765 - DNA, 24 bp, synthetic construct
  misc_feature 1..24: note = Synthetic
  source 1..24: mol_type = other DNA
accatgggacggtctttcacgtga

SEQ ID NO: 8766 - DNA, 24 bp, synthetic construct
  misc_feature 1..24: note = Synthetic
  source 1..24: mol_type = other DNA
ccaggctgctactgaaccgcgtag

SEQ ID NO: 8767 - DNA, 24 bp, synthetic construct
  misc_feature 1..24: note = Synthetic
  source 1..24: mol_type = other DNA
ttattccaatggatacatatcggt

SEQ ID NO: 8768 - DNA, 24 bp, synthetic construct
  misc_feature 1..24: note = Synthetic
  source 1..24: mol_type = other DNA
ctggtcgctaaagcgccaagccgt

SEQ ID NO: 8769 - DNA, 24 bp, synthetic construct
  misc_feature 1..24: note = Synthetic
  source 1..24: mol_type = other DNA
tcttggtcctacgcaattgtacct

SEQ ID NO: 8770 - DNA, 24 bp, synthetic construct
  misc_feature 1..24: note = Synthetic
  source 1..24: mol_type = other DNA
tcagaaggccatgctgcggtcatc

SEQ ID NO: 8771 - DNA, 24 bp, synthetic construct
  misc_feature 1..24: note = Synthetic
  source 1..24: mol_type = other DNA
gcatgggcccgttcgctatgtcac

SEQ ID NO: 8772 - DNA, 24 bp, synthetic construct
  misc_feature 1..24: note = Synthetic
  source 1..24: mol_type = other DNA
ttcctaagccggtcatatcatgac

SEQ ID NO: 8773 - DNA, 24 bp, synthetic construct
  misc_feature 1..24: note = Synthetic
  source 1..24: mol_type = other DNA
caacgtaatgcggatccaccacgc

SEQ ID NO: 8774 - DNA, 24 bp, synthetic construct
  misc_feature 1..24: note = Synthetic
  source 1..24: mol_type = other DNA
gaagggataaaggaaccatggcgt

SEQ ID NO: 8775 - DNA, 24 bp, synthetic construct
  misc_feature 1..24: note = Synthetic
  source 1..24: mol_type = other DNA
tgcggcagatttcatcttaccagg

SEQ ID NO: 8776 - DNA, 24 bp, synthetic construct
  misc_feature 1..24: note = Synthetic
  source 1..24: mol_type = other DNA
ccaacggcccgaatatacttcttt

SEQ ID NO: 8777 - DNA, 24 bp, synthetic construct
  misc_feature 1..24: note = Synthetic
  source 1..24: mol_type = other DNA
cctttctagcagttctagtactca

SEQ ID NO: 8778 - DNA, 24 bp, synthetic construct
  misc_feature 1..24: note = Synthetic
  source 1..24: mol_type = other DNA
ctgcagtcattgtgaccacatagg

SEQ ID NO: 8779 - DNA, 24 bp, synthetic construct
  misc_feature 1..24: note = Synthetic
  source 1..24: mol_type = other DNA
agaagaactttagcctacctatca

SEQ ID NO: 8780 - DNA, 24 bp, synthetic construct
  misc_feature 1..24: note = Synthetic
  source 1..24: mol_type = other DNA
gatttgccggttcggcgacgtgac

SEQ ID NO: 8781 - DNA, 24 bp, synthetic construct
  misc_feature 1..24: note = Synthetic
  source 1..24: mol_type = other DNA
ttcaaagaagcggtgaggcgctgg

SEQ ID NO: 8782 - DNA, 24 bp, synthetic construct
  misc_feature 1..24: note = Synthetic
  source 1..24: mol_type = other DNA
tacgcagtggtctcacaccatgga

SEQ ID NO: 8783 - DNA, 24 bp, synthetic construct
  misc_feature 1..24: note = Synthetic
  source 1..24: mol_type = other DNA
cctcttcgtttctaacttcaacac

SEQ ID NO: 8784 - DNA, 24 bp, synthetic construct
  misc_feature 1..24: note = Synthetic
  source 1..24: mol_type = other DNA
agcttcctgaacttgtcacgtcgg

SEQ ID NO: 8785 - DNA, 24 bp, synthetic construct
  misc_feature 1..24: note = Synthetic
  source 1..24: mol_type = other DNA
ttagaccatggtcttgaagtcata

SEQ ID NO: 8786 - DNA, 24 bp, synthetic construct
  misc_feature 1..24: note = Synthetic
  source 1..24: mol_type = other DNA
cggaagttccagagttgactgaca

SEQ ID NO: 8787 - DNA, 24 bp, synthetic construct
  misc_feature 1..24: note = Synthetic
  source 1..24: mol_type = other DNA
agctcccgctcgactcagactgta

SEQ ID NO: 8788 - DNA, 24 bp, synthetic construct
  misc_feature 1..24: note = Synthetic
  source 1..24: mol_type = other DNA
tccctcgtactcccgcttccatga

SEQ ID NO: 8789 - DNA, 24 bp, synthetic construct
  misc_feature 1..24: note = Synthetic
  source 1..24: mol_type = other DNA
ggtggtaagtggagaagtccgtaa

SEQ ID NO: 8790 - DNA, 24 bp, synthetic construct
  misc_feature 1..24: note = Synthetic
  source 1..24: mol_type = other DNA
tgtaattggataatagttataagc

SEQ ID NO: 8791 - DNA, 24 bp, synthetic construct
  misc_feature 1..24: note = Synthetic
  source 1..24: mol_type = other DNA
tctgcaatgggcgtcacgtgaccc

SEQ ID NO: 8792 - DNA, 24 bp, synthetic construct
  misc_feature 1..24: note = Synthetic
  source 1..24: mol_type = other DNA
gtctcagtccagtaggatgtccta

SEQ ID NO: 8793 - DNA, 24 bp, synthetic construct
  misc_feature 1..24: note = Synthetic
  source 1..24: mol_type = other DNA
attctggctagctgatcctgtgta

SEQ ID NO: 8794 - DNA, 24 bp, synthetic construct
  misc_feature 1..24: note = Synthetic
  source 1..24: mol_type = other DNA
atttcggaatactggagcgagaga

SEQ ID NO: 8795 - DNA, 24 bp, synthetic construct
  misc_feature 1..24: note = Synthetic
  source 1..24: mol_type = other DNA
tccttgtaagctgagtttgtaaat

SEQ ID NO: 8796 - DNA, 24 bp, synthetic construct
  misc_feature 1..24: note = Synthetic
  source 1..24: mol_type = other DNA
atgatgactgtcattccgcgagta

SEQ ID NO: 8797 - DNA, 24 bp, synthetic construct
  misc_feature 1..24: note = Synthetic
  source 1..24: mol_type = other DNA
aaggttcgcgatccacaggaggtc

SEQ ID NO: 8798 - DNA, 24 bp, synthetic construct
  misc_feature 1..24: note = Synthetic
  source 1..24: mol_type = other DNA
gttaagcactgtaatacaaacgct

SEQ ID NO: 8799 - DNA, 24 bp, synthetic construct
  misc_feature 1..24: note = Synthetic
  source 1..24: mol_type = other DNA
aggccagtccgtgaagccacgcat

SEQ ID NO: 8800 - DNA, 24 bp, synthetic construct
  misc_feature 1..24: note = Synthetic
  source 1..24: mol_type = other DNA
caagcttgttacgagatgttacct

SEQ ID NO: 8801 - DNA, 24 bp, synthetic construct
  misc_feature 1..24: note = Synthetic
  source 1..24: mol_type = other DNA
ttgatgtccgaagtaactctaaag

SEQ ID NO: 8802 - DNA, 24 bp, synthetic construct
  misc_feature 1..24: note = Synthetic
  source 1..24: mol_type = other DNA
atgtcccttgggttagagtagagg

SEQ ID NO: 8803 - DNA, 24 bp, synthetic construct
  misc_feature 1..24: note = Synthetic
  source 1..24: mol_type = other DNA
attacaagccgtaggatgcctgct

SEQ ID NO: 8804 - DNA, 24 bp, synthetic construct
  misc_feature 1..24: note = Synthetic
  source 1..24: mol_type = other DNA
ccactctaaatccagatcctcctt

SEQ ID NO: 8805 - DNA, 24 bp, synthetic construct
  misc_feature 1..24: note = Synthetic
  source 1..24: mol_type = other DNA
acatagatcacttctaactatggg

SEQ ID NO: 8806 - DNA, 24 bp, synthetic construct
  misc_feature 1..24: note = Synthetic
  source 1..24: mol_type = other DNA
gatgtcgtgctgtgaaatatcgcg

SEQ ID NO: 8807 - DNA, 24 bp, synthetic construct
  misc_feature 1..24: note = Synthetic
  source 1..24: mol_type = other DNA
tcttagggactttcgacttcagtt

SEQ ID NO: 8808 - DNA, 24 bp, synthetic construct
  misc_feature 1..24: note = Synthetic
  source 1..24: mol_type = other DNA
cgcaacattgagggtagtccatcc

SEQ ID NO: 8809 - DNA, 24 bp, synthetic construct
  misc_feature 1..24: note = Synthetic
  source 1..24: mol_type = other DNA
ccagctgttgaggtattggtacta

SEQ ID NO: 8810 - DNA, 24 bp, synthetic construct
  misc_feature 1..24: note = Synthetic
  source 1..24: mol_type = other DNA
aaaggtgaacgaacataggattcg

SEQ ID NO: 8811 - DNA, 24 bp, synthetic construct
  misc_feature 1..24: note = Synthetic
  source 1..24: mol_type = other DNA
agagtacgatgtacggcgccttat

SEQ ID NO: 8812 - DNA, 24 bp, synthetic construct
  misc_feature 1..24: note = Synthetic
  source 1..24: mol_type = other DNA
ctcccaggtactgttggccaaata

SEQ ID NO: 8813 - DNA, 24 bp, synthetic construct
  misc_feature 1..24: note = Synthetic
  source 1..24: mol_type = other DNA
caaacagccgtgatgtatcagatc

SEQ ID NO: 8814 - DNA, 24 bp, synthetic construct
  misc_feature 1..24: note = Synthetic
  source 1..24: mol_type = other DNA
gccaatccacagatatctttaacg

SEQ ID NO: 8815 - DNA, 24 bp, synthetic construct
  misc_feature 1..24: note = Synthetic
  source 1..24: mol_type = other DNA
caatcgtacggactctgtattcag

SEQ ID NO: 8816 - DNA, 24 bp, synthetic construct
  misc_feature 1..24: note = Synthetic
  source 1..24: mol_type = other DNA
cggactcagcgagttcggccgagc

SEQ ID NO: 8817 - DNA, 24 bp, synthetic construct
  misc_feature 1..24: note = Synthetic
  source 1..24: mol_type = other DNA
tggagaacagccctgggtggcata

SEQ ID NO: 8818 - DNA, 24 bp, synthetic construct
  misc_feature 1..24: note = Synthetic
  source 1..24: mol_type = other DNA
agcgagccgagaccgtcgggtaga

SEQ ID NO: 8819 - DNA, 24 bp, synthetic construct
  misc_feature 1..24: note = Synthetic
  source 1..24: mol_type = other DNA
ttcgcgtatttgcgtatcgctggg

SEQ ID NO: 8820 - DNA, 24 bp, synthetic construct
  misc_feature 1..24: note = Synthetic
  source 1..24: mol_type = other DNA
actatcaaacgagctgtggttgta

SEQ ID NO: 8821 - DNA, 24 bp, synthetic construct
  misc_feature 1..24: note = Synthetic
  source 1..24: mol_type = other DNA
catacacgttgatgtctttgtggc

SEQ ID NO: 8822 - DNA, 24 bp, synthetic construct
  misc_feature 1..24: note = Synthetic
  source 1..24: mol_type = other DNA
tggaaagcatcgaatatatggcta

SEQ ID NO: 8823 - DNA, 24 bp, synthetic construct
  misc_feature 1..24: note = Synthetic
  source 1..24: mol_type = other DNA
accatccactttgtttgtcgcgaa

SEQ ID NO: 8824 - DNA, 24 bp, synthetic construct
  misc_feature 1..24: note = Synthetic
  source 1..24: mol_type = other DNA
aaacaggagcaatttcatcagacg

SEQ ID NO: 8825 - DNA, 24 bp, synthetic construct
  misc_feature 1..24: note = Synthetic
  source 1..24: mol_type = other DNA
ggaatcattcggtatttgactatg

SEQ ID NO: 8826 - DNA, 24 bp, synthetic construct
  misc_feature 1..24: note = Synthetic
  source 1..24: mol_type = other DNA
actcaggagtggtgcgagatgaga

SEQ ID NO: 8827 - DNA, 24 bp, synthetic construct
  misc_feature 1..24: note = Synthetic
  source 1..24: mol_type = other DNA
aatcggctgaaggtctaaggacat

SEQ ID NO: 8828 - DNA, 24 bp, synthetic construct
  misc_feature 1..24: note = Synthetic
  source 1..24: mol_type = other DNA
aatctctgcaccggccggtcaacc

SEQ ID NO: 8829 - DNA, 24 bp, synthetic construct
  misc_feature 1..24: note = Synthetic
  source 1..24: mol_type = other DNA
ttatagtacactcgcaagcatgta

SEQ ID NO: 8830 - DNA, 24 bp, synthetic construct
  misc_feature 1..24: note = Synthetic
  source 1..24: mol_type = other DNA
gttctcacgtaatgatgagtatct

SEQ ID NO: 8831 - DNA, 24 bp, synthetic construct
  misc_feature 1..24: note = Synthetic
  source 1..24: mol_type = other DNA
ctaactgccaagtggcgatctctt

SEQ ID NO: 8832 - DNA, 24 bp, synthetic construct
  misc_feature 1..24: note = Synthetic
  source 1..24: mol_type = other DNA
ctagtgcactcatccgtatgatgc

SEQ ID NO: 8833 - DNA, 24 bp, synthetic construct
  misc_feature 1..24: note = Synthetic
  source 1..24: mol_type = other DNA
agcgctccgttccctaagttaacc

SEQ ID NO: 8834 - DNA, 24 bp, synthetic construct
  misc_feature 1..24: note = Synthetic
  source 1..24: mol_type = other DNA
tggatcatttcgcaactatgttaa

SEQ ID NO: 8835 - DNA, 24 bp, synthetic construct
  misc_feature 1..24: note = Synthetic
  source 1..24: mol_type = other DNA
tgtcgtgtggaccgaccagcttgg

SEQ ID NO: 8836 - DNA, 24 bp, synthetic construct
  misc_feature 1..24: note = Synthetic
  source 1..24: mol_type = other DNA
agttgcccagacgattgggcgtgc

SEQ ID NO: 8837 - DNA, 24 bp, synthetic construct
  misc_feature 1..24: note = Synthetic
  source 1..24: mol_type = other DNA
taaatgatagcaacgcaatgaaag

SEQ ID NO: 8838 - DNA, 24 bp, synthetic construct
  misc_feature 1..24: note = Synthetic
  source 1..24: mol_type = other DNA
cataggcgtgagattctacggagt

SEQ ID NO: 8839 - DNA, 24 bp, synthetic construct
  misc_feature 1..24: note = Synthetic
  source 1..24: mol_type = other DNA
cccacattcatgtgaccgtccgta

SEQ ID NO: 8840 - DNA, 24 bp, synthetic construct
  misc_feature 1..24: note = Synthetic
  source 1..24: mol_type = other DNA
atagttagggcgactgctcgggta

SEQ ID NO: 8841 - DNA, 24 bp, synthetic construct
  misc_feature 1..24: note = Synthetic
  source 1..24: mol_type = other DNA
tttacgcacgcgcacaagcgagtg

SEQ ID NO: 8842 - DNA, 24 bp, synthetic construct
  misc_feature 1..24: note = Synthetic
  source 1..24: mol_type = other DNA
tctgcattacttggccaggagtgt

SEQ ID NO: 8843 - DNA, 24 bp, synthetic construct
  misc_feature 1..24: note = Synthetic
  source 1..24: mol_type = other DNA
aagttcgtgctttagtgaccatga

SEQ ID NO: 8844 - DNA, 24 bp, synthetic construct
  misc_feature 1..24: note = Synthetic
  source 1..24: mol_type = other DNA
tattcgcattagtatgattatgaa

SEQ ID NO: 8845 - DNA, 24 bp, synthetic construct
  misc_feature 1..24: note = Synthetic
  source 1..24: mol_type = other DNA
atatgtgagccaaagatgattaaa

SEQ ID NO: 8846 - DNA, 24 bp, synthetic construct
  misc_feature 1..24: note = Synthetic
  source 1..24: mol_type = other DNA
gacgaatagtaggttcttcgatcg

SEQ ID NO: 8847 - DNA, 24 bp, synthetic construct
  misc_feature 1..24: note = Synthetic
  source 1..24: mol_type = other DNA
gtacatatagccgcggaggatgct

SEQ ID NO: 8848 - DNA, 24 bp, synthetic construct
  misc_feature 1..24: note = Synthetic
  source 1..24: mol_type = other DNA
gctctaaggtgagattcgctctac

SEQ ID NO: 8849 - DNA, 24 bp, synthetic construct
  misc_feature 1..24: note = Synthetic
  source 1..24: mol_type = other DNA
ccataaccacaatagtgtatacag

SEQ ID NO: 8850 - DNA, 24 bp, synthetic construct
  misc_feature 1..24: note = Synthetic
  source 1..24: mol_type = other DNA
ttcacgtgtgtgaagcggtgacgt

SEQ ID NO: 8851 - DNA, 24 bp, synthetic construct
  misc_feature 1..24: note = Synthetic
  source 1..24: mol_type = other DNA
tgaaacctccacggcactccatga

SEQ ID NO: 8852 - DNA, 24 bp, synthetic construct
  misc_feature 1..24: note = Synthetic
  source 1..24: mol_type = other DNA
tcagctacttcctttacaggtccc

SEQ ID NO: 8853 - DNA, 24 bp, synthetic construct
  misc_feature 1..24: note = Synthetic
  source 1..24: mol_type = other DNA
aacccgcttgcgatctcgatatcc

SEQ ID NO: 8854 - DNA, 24 bp, synthetic construct
  misc_feature 1..24: note = Synthetic
  source 1..24: mol_type = other DNA
cctggtaagcaggacataatttct

SEQ ID NO: 8855 - DNA, 24 bp, synthetic construct
  misc_feature 1..24: note = Synthetic
  source 1..24: mol_type = other DNA
ggatgaccctacgaacttacaaat

SEQ ID NO: 8856 - DNA, 24 bp, synthetic construct
  misc_feature 1..24: note = Synthetic
  source 1..24: mol_type = other DNA
ccctagaatttgctgcgactcagg

SEQ ID NO: 8857 - DNA, 24 bp, synthetic construct
  misc_feature 1..24: note = Synthetic
  source 1..24: mol_type = other DNA
gctactccattagtccggtggcca

SEQ ID NO: 8858 - DNA, 24 bp, synthetic construct
  misc_feature 1..24: note = Synthetic
  source 1..24: mol_type = other DNA
tgcacctcgctcaataccaagacc

SEQ ID NO: 8859 - DNA, 24 bp, synthetic construct
  misc_feature 1..24: note = Synthetic
  source 1..24: mol_type = other DNA
acctcatccgataacaggccggcc

SEQ ID NO: 8860 - DNA, 24 bp, synthetic construct
  misc_feature 1..24: note = Synthetic
  source 1..24: mol_type = other DNA
gttacggagtgggatagtaatacc

SEQ ID NO: 8861 - DNA, 24 bp, synthetic construct
  misc_feature 1..24: note = Synthetic
  source 1..24: mol_type = other DNA
attagttccgcactcgggcgtctc

SEQ ID NO: 8862 - DNA, 24 bp, synthetic construct
  misc_feature 1..24: note = Synthetic
  source 1..24: mol_type = other DNA
tgggagacgcagtttcaccaccag

SEQ ID NO: 8863 - DNA, 24 bp, synthetic construct
  misc_feature 1..24: note = Synthetic
  source 1..24: mol_type = other DNA
gtctagggcaataaatacgtctat

SEQ ID NO: 8864 - DNA, 24 bp, synthetic construct
  misc_feature 1..24: note = Synthetic
  source 1..24: mol_type = other DNA
gacacgacgagtatcagttccagc

SEQ ID NO: 8865 - DNA, 24 bp, synthetic construct
  misc_feature 1..24: note = Synthetic
  source 1..24: mol_type = other DNA
gccgtgagtgcagtgaagatgtgg

SEQ ID NO: 8866 - DNA, 24 bp, synthetic construct
  misc_feature 1..24: note = Synthetic
  source 1..24: mol_type = other DNA
tcgttactatcgtaatggcagaac

SEQ ID NO: 8867 - DNA, 24 bp, synthetic construct
  misc_feature 1..24: note = Synthetic
  source 1..24: mol_type = other DNA
gattggtcagcagaattcgttgtc

SEQ ID NO: 8868 - DNA, 24 bp, synthetic construct
  misc_feature 1..24: note = Synthetic
  source 1..24: mol_type = other DNA
agagcgaggcacgtaggagataac

SEQ ID NO: 8869 - DNA, 24 bp, synthetic construct
  misc_feature 1..24: note = Synthetic
  source 1..24: mol_type = other DNA
gcgtaataaactagaattgtactg

SEQ ID NO: 8870 - DNA, 24 bp, synthetic construct
  misc_feature 1..24: note = Synthetic
  source 1..24: mol_type = other DNA
tcggagatcgagcggaaattgatc

SEQ ID NO: 8871 - DNA, 24 bp, synthetic construct
  misc_feature 1..24: note = Synthetic
  source 1..24: mol_type = other DNA
gtagtgcctgtttactcatttcct

SEQ ID NO: 8872 - DNA, 24 bp, synthetic construct
  misc_feature 1..24: note = Synthetic
  source 1..24: mol_type = other DNA
tgcgctcaataaatttcaccagta

SEQ ID NO: 8873 - DNA, 24 bp, synthetic construct
  misc_feature 1..24: note = Synthetic
  source 1..24: mol_type = other DNA
tctccaaatcttccaactaggtaa

SEQ ID NO: 8874 - DNA, 24 bp, synthetic construct
  misc_feature 1..24: note = Synthetic
  source 1..24: mol_type = other DNA
caacctaaaccctcccgtcgaagc

SEQ ID NO: 8875 - DNA, 24 bp, synthetic construct
  misc_feature 1..24: note = Synthetic
  source 1..24: mol_type = other DNA
gtactgcacgacacgacaactgtc

SEQ ID NO: 8876 - DNA, 24 bp, synthetic construct
  misc_feature 1..24: note = Synthetic
  source 1..24: mol_type = other DNA
gccacttcgcaactcgccgctctg

SEQ ID NO: 8877 - DNA, 24 bp, synthetic construct
  misc_feature 1..24: note = Synthetic
  source 1..24: mol_type = other DNA
ggccgctcaggccgggtatctcct

SEQ ID NO: 8878 - DNA, 24 bp, synthetic construct
  misc_feature 1..24: note = Synthetic
  source 1..24: mol_type = other DNA
gctcgcgcatggcgatgataacgt

SEQ ID NO: 8879 - DNA, 24 bp, synthetic construct
  misc_feature 1..24: note = Synthetic
  source 1..24: mol_type = other DNA
tgaattagaacctgtatggtacgc

SEQ ID NO: 8880 - DNA, 24 bp, synthetic construct
  misc_feature 1..24: note = Synthetic
  source 1..24: mol_type = other DNA
cggccagctttcgcagagtgtgtt

SEQ ID NO: 8881 - DNA, 24 bp, synthetic construct
  misc_feature 1..24: note = Synthetic
  source 1..24: mol_type = other DNA
gaatcgatacggacccagttgaac

SEQ ID NO: 8882 - DNA, 24 bp, synthetic construct
  misc_feature 1..24: note = Synthetic
  source 1..24: mol_type = other DNA
gtccacgagaactttggatacgaa

SEQ ID NO: 8883 - DNA, 24 bp, synthetic construct
  misc_feature 1..24: note = Synthetic
  source 1..24: mol_type = other DNA
gtgagtggtggaagatatggctca

SEQ ID NO: 8884 - DNA, 24 bp, synthetic construct
  misc_feature 1..24: note = Synthetic
  source 1..24: mol_type = other DNA
atatgatgcgagcggcgcacggtt

SEQ ID NO: 8885 - DNA, 24 bp, synthetic construct
  misc_feature 1..24: note = Synthetic
  source 1..24: mol_type = other DNA
agatggcaaaggtacacgcacgtg

SEQ ID NO: 8886 - DNA, 24 bp, synthetic construct
  misc_feature 1..24: note = Synthetic
  source 1..24: mol_type = other DNA
ccctctccgttgtcgtaacgtatt

SEQ ID NO: 8887 - DNA, 24 bp, synthetic construct
  misc_feature 1..24: note = Synthetic
  source 1..24: mol_type = other DNA
ggtacttatcgtgatcggtaaatg

SEQ ID NO: 8888 - DNA, 24 bp, synthetic construct
  misc_feature 1..24: note = Synthetic
  source 1..24: mol_type = other DNA
atttatgaggccacgctacattgt

SEQ ID NO: 8889 - DNA, 24 bp, synthetic construct
  misc_feature 1..24: note = Synthetic
  source 1..24: mol_type = other DNA
actaacttgcgcgggcaagcttct

SEQ ID NO: 8890 - DNA, 24 bp, synthetic construct
  misc_feature 1..24: note = Synthetic
  source 1..24: mol_type = other DNA
cgatgactcggttcaccactgtat

SEQ ID NO: 8891 - DNA, 24 bp, synthetic construct
  misc_feature 1..24: note = Synthetic
  source 1..24: mol_type = other DNA
cccgcgactactacacgaaagccc

SEQ ID NO: 8892 - DNA, 24 bp, synthetic construct
  misc_feature 1..24: note = Synthetic
  source 1..24: mol_type = other DNA
tcgcgacccgtcaggagcataccg

SEQ ID NO: 8893 - DNA, 24 bp, synthetic construct
  misc_feature 1..24: note = Synthetic
  source 1..24: mol_type = other DNA
aatcgtcgagccttctagttgaca

SEQ ID NO: 8894 - DNA, 24 bp, synthetic construct
  misc_feature 1..24: note = Synthetic
  source 1..24: mol_type = other DNA
ccatagtaagactcagtttgttgg

SEQ ID NO: 8895 - DNA, 24 bp, synthetic construct
  misc_feature 1..24: note = Synthetic
  source 1..24: mol_type = other DNA
ccaacaggttagaacgtcatctcc

SEQ ID NO: 8896 - DNA, 24 bp, synthetic construct
  misc_feature 1..24: note = Synthetic
  source 1..24: mol_type = other DNA
tatggcaagtttccctgtagggat

SEQ ID NO: 8897 - DNA, 24 bp, synthetic construct
  misc_feature 1..24: note = Synthetic
  source 1..24: mol_type = other DNA
gccaaataaatccgcgcattactc

SEQ ID NO: 8898 - DNA, 24 bp, synthetic construct
  misc_feature 1..24: note = Synthetic
  source 1..24: mol_type = other DNA
agaaacatgctcggtgctacggtt

SEQ ID NO: 8899 - DNA, 24 bp, synthetic construct
  misc_feature 1..24: note = Synthetic
  source 1..24: mol_type = other DNA
agtcgaagggctcttagattcagg

SEQ ID NO: 8900 - DNA, 24 bp, synthetic construct
  misc_feature 1..24: note = Synthetic
  source 1..24: mol_type = other DNA
tataccagcgtgttaatccagcaa

SEQ ID NO: 8901 - DNA, 24 bp, synthetic construct
  misc_feature 1..24: note = Synthetic
  source 1..24: mol_type = other DNA
gcaggaccacttggcgcagagcgt

SEQ ID NO: 8902 - DNA, 24 bp, synthetic construct
  misc_feature 1..24: note = Synthetic
  source 1..24: mol_type = other DNA
agagtgcccgtggtatctggtaca

SEQ ID NO: 8903 - DNA, 24 bp, synthetic construct
  misc_feature 1..24: note = Synthetic
  source 1..24: mol_type = other DNA
cacagctggcgtagtccttagact

SEQ ID NO: 8904 - DNA, 24 bp, synthetic construct
  misc_feature 1..24: note = Synthetic
  source 1..24: mol_type = other DNA
tgagctagacacttagtggttaaa

SEQ ID NO: 8905 - DNA, 24 bp, synthetic construct
  misc_feature 1..24: note = Synthetic
  source 1..24: mol_type = other DNA
tgatccctcagcgattccgcactt

SEQ ID NO: 8906 - DNA, 24 bp, synthetic construct
  misc_feature 1..24: note = Synthetic
  source 1..24: mol_type = other DNA
attgtacgtacaggaggttgatat

SEQ ID NO: 8907 - DNA, 24 bp, synthetic construct
  misc_feature 1..24: note = Synthetic
  source 1..24: mol_type = other DNA
attgatcgaagcgcagcctctagg

SEQ ID NO: 8908 - DNA, 24 bp, synthetic construct
  misc_feature 1..24: note = Synthetic
  source 1..24: mol_type = other DNA
ggatgcattaaccacgtcagtcgc

SEQ ID NO: 8909 - DNA, 24 bp, synthetic construct
  misc_feature 1..24: note = Synthetic
  source 1..24: mol_type = other DNA
atcttacaccctagcagaggtcgt

SEQ ID NO: 8910 - DNA, 24 bp, synthetic construct
  misc_feature 1..24: note = Synthetic
  source 1..24: mol_type = other DNA
acatctcaccacgctgggctatta

SEQ ID NO: 8911 - DNA, 24 bp, synthetic construct
  misc_feature 1..24: note = Synthetic
  source 1..24: mol_type = other DNA
ccaagaggcacagactcgcgtgtg

SEQ ID NO: 8912 - DNA, 24 bp, synthetic construct
  misc_feature 1..24: note = Synthetic
  source 1..24: mol_type = other DNA
acgagatactgtcttgtcgggtga

SEQ ID NO: 8913 - DNA, 24 bp, synthetic construct
  misc_feature 1..24: note = Synthetic
  source 1..24: mol_type = other DNA
agggtcacacagtcctgccttgtg

SEQ ID NO: 8914 - DNA, 24 bp, synthetic construct
  misc_feature 1..24: note = Synthetic
  source 1..24: mol_type = other DNA
ttcccgaataacgagcttagcagt

SEQ ID NO: 8915 - DNA, 24 bp, synthetic construct
  misc_feature 1..24: note = Synthetic
  source 1..24: mol_type = other DNA
gtttagacacgtagttaacttcta

SEQ ID NO: 8916 - DNA, 24 bp, synthetic construct
  misc_feature 1..24: note = Synthetic
  source 1..24: mol_type = other DNA
tcggctgcaactagatgcattaca

SEQ ID NO: 8917 - DNA, 24 bp, synthetic construct
  misc_feature 1..24: note = Synthetic
  source 1..24: mol_type = other DNA
gaagtcacaactaaccaagtgtgc

SEQ ID NO: 8918 - DNA, 24 bp, synthetic construct
  misc_feature 1..24: note = Synthetic
  source 1..24: mol_type = other DNA
gaacgctacgtcagccttgattac

SEQ ID NO: 8919 - DNA, 24 bp, synthetic construct
  misc_feature 1..24: note = Synthetic
  source 1..24: mol_type = other DNA
taatacacctcatgggtcatggtc

SEQ ID NO: 8920 - DNA, 24 bp, synthetic construct
  misc_feature 1..24: note = Synthetic
  source 1..24: mol_type = other DNA
atgcatctagtcaaccacctgcca

SEQ ID NO: 8921 - DNA, 24 bp, synthetic construct
  misc_feature 1..24: note = Synthetic
  source 1..24: mol_type = other DNA
ctctgctacttgcactaaggccgg

SEQ ID NO: 8922 - DNA, 24 bp, synthetic construct
  misc_feature 1..24: note = Synthetic
  source 1..24: mol_type = other DNA
atgattcttacgtctcgaactaat

SEQ ID NO: 8923 - DNA, 24 bp, synthetic construct
  misc_feature 1..24: note = Synthetic
  source 1..24: mol_type = other DNA
gaacgtgatcccgtctcctacaac

SEQ ID NO: 8924 - DNA, 24 bp, synthetic construct
  misc_feature 1..24: note = Synthetic
  source 1..24: mol_type = other DNA
ggagacggcgagtacacgcaccca

SEQ ID NO: 8925 - DNA, 24 bp, synthetic construct
  misc_feature 1..24: note = Synthetic
  source 1..24: mol_type = other DNA
actatactggtacgccatgctgtc

SEQ ID NO: 8926 - DNA, 24 bp, synthetic construct
  misc_feature 1..24: note = Synthetic
  source 1..24: mol_type = other DNA
ttcaaggtcgcgacaagatagcga

SEQ ID NO: 8927 - DNA, 24 bp, synthetic construct
  misc_feature 1..24: note = Synthetic
  source 1..24: mol_type = other DNA
aggcggtgacgatcatacgcccga

SEQ ID NO: 8928 - DNA, 24 bp, synthetic construct
  misc_feature 1..24: note = Synthetic
  source 1..24: mol_type = other DNA
gctgtcaacgagacaaacaagtcg

SEQ ID NO: 8929 - DNA, 24 bp, synthetic construct
  misc_feature 1..24: note = Synthetic
  source 1..24: mol_type = other DNA
agttcagcaaggtgctaatactgg

SEQ ID NO: 8930 - DNA, 24 bp, synthetic construct
  misc_feature 1..24: note = Synthetic
  source 1..24: mol_type = other DNA
aacgctacaggtacgtgtaaatgc

SEQ ID NO: 8931 - DNA, 24 bp, synthetic construct
  misc_feature 1..24: note = Synthetic
  source 1..24: mol_type = other DNA
tcctatgcatcgaattacaccgcg

SEQ ID NO: 8932 - DNA, 24 bp, synthetic construct
  misc_feature 1..24: note = Synthetic
  source 1..24: mol_type = other DNA
catccgttactaggcccgcttagc

SEQ ID NO: 8933 - DNA, 24 bp, synthetic construct
  misc_feature 1..24: note = Synthetic
  source 1..24: mol_type = other DNA
ggatactgccttgctactcgtccg

SEQ ID NO: 8934 - DNA, 24 bp, synthetic construct
  misc_feature 1..24: note = Synthetic
  source 1..24: mol_type = other DNA
gatattcctctatggtcacctcag

SEQ ID NO: 8935 - DNA, 24 bp, synthetic construct
  misc_feature 1..24: note = Synthetic
  source 1..24: mol_type = other DNA
atgtcggaacgtgtagggtcaaat

SEQ ID NO: 8936 - DNA, 24 bp, synthetic construct
  misc_feature 1..24: note = Synthetic
  source 1..24: mol_type = other DNA
cggcgcgggctcgagtgtgaagga

SEQ ID NO: 8937 - DNA, 24 bp, synthetic construct
  misc_feature 1..24: note = Synthetic
  source 1..24: mol_type = other DNA
agcagccagtctactacctttatg

SEQ ID NO: 8938 - DNA, 24 bp, synthetic construct
  misc_feature 1..24: note = Synthetic
  source 1..24: mol_type = other DNA
aatatccgtcattgctgtgactcc

SEQ ID NO: 8939 - DNA, 24 bp, synthetic construct
  misc_feature 1..24: note = Synthetic
  source 1..24: mol_type = other DNA
ttctgcagaggttggtcgccatcg

SEQ ID NO: 8940 - DNA, 24 bp, synthetic construct
  misc_feature 1..24: note = Synthetic
  source 1..24: mol_type = other DNA
aactcagccgctggaatgaaccca

SEQ ID NO: 8941 - DNA, 24 bp, synthetic construct
  misc_feature 1..24: note = Synthetic
  source 1..24: mol_type = other DNA
agcagaagaagcgctaggctgagc

SEQ ID NO: 8942 - DNA, 24 bp, synthetic construct
  misc_feature 1..24: note = Synthetic
  source 1..24: mol_type = other DNA
gccgaccaatttggaatacgcatc

SEQ ID NO: 8943 - DNA, 24 bp, synthetic construct
  misc_feature 1..24: note = Synthetic
  source 1..24: mol_type = other DNA
tatcgccggagcgatcagcgaatg

SEQ ID NO: 8944 - DNA, 24 bp, synthetic construct
  misc_feature 1..24: note = Synthetic
  source 1..24: mol_type = other DNA
ctagtctcgtcggtttattcctac

SEQ ID NO: 8945 - DNA, 24 bp, synthetic construct
  misc_feature 1..24: note = Synthetic
  source 1..24: mol_type = other DNA
tgaaccttgcgaattacgtctggt

SEQ ID NO: 8946 - DNA, 24 bp, synthetic construct
  misc_feature 1..24: note = Synthetic
  source 1..24: mol_type = other DNA
tgctcctagctacttgtagcgacc

SEQ ID NO: 8947 - DNA, 24 bp, synthetic construct
  misc_feature 1..24: note = Synthetic
  source 1..24: mol_type = other DNA
acactctgtgacaatacggcttta

SEQ ID NO: 8948 - DNA, 24 bp, synthetic construct
  misc_feature 1..24: note = Synthetic
  source 1..24: mol_type = other DNA
gcgtcgaccctttgatagtacggt

SEQ ID NO: 8949 - DNA, 24 bp, synthetic construct
  misc_feature 1..24: note = Synthetic
  source 1..24: mol_type = other DNA
ggtcgtacttattgaattgacatt

SEQ ID NO: 8950 - DNA, 24 bp, synthetic construct
  misc_feature 1..24: note = Synthetic
  source 1..24: mol_type = other DNA
gagatcacttaacgcgcctcatcg

SEQ ID NO: 8951 - DNA, 24 bp, synthetic construct
  misc_feature 1..24: note = Synthetic
  source 1..24: mol_type = other DNA
cgtgggtcccttaacgtgcaggtt

SEQ ID NO: 8952 - DNA, 24 bp, synthetic construct
  misc_feature 1..24: note = Synthetic
  source 1..24: mol_type = other DNA
gggacaacgtctgcgaggtcccta

SEQ ID NO: 8953 - DNA, 24 bp, synthetic construct
  misc_feature 1..24: note = Synthetic
  source 1..24: mol_type = other DNA
ttgaatctgccaagggtcgcttgc

SEQ ID NO: 8954 - DNA, 24 bp, synthetic construct
  misc_feature 1..24: note = Synthetic
  source 1..24: mol_type = other DNA
caggataccagcagtgatcccttc

SEQ ID NO: 8955 - DNA, 24 bp, synthetic construct
  misc_feature 1..24: note = Synthetic
  source 1..24: mol_type = other DNA
atggtctcgttatattgttaggat

SEQ ID NO: 8956 - DNA, 24 bp, synthetic construct
  misc_feature 1..24: note = Synthetic
  source 1..24: mol_type = other DNA
ttcacaccatatggtaccgtgctc

SEQ ID NO: 8957 - DNA, 24 bp, synthetic construct
  misc_feature 1..24: note = Synthetic
  source 1..24: mol_type = other DNA
taccagcgcgaggaagtaccaaag

SEQ ID NO: 8958 - DNA, 24 bp, synthetic construct
  misc_feature 1..24: note = Synthetic
  source 1..24: mol_type = other DNA
ccagccgggcacgccgtttgatat

SEQ ID NO: 8959 - DNA, 24 bp, synthetic construct
  misc_feature 1..24: note = Synthetic
  source 1..24: mol_type = other DNA
acgccgttaatagcaggatttaca

SEQ ID NO: 8960 - DNA, 24 bp, synthetic construct
  misc_feature 1..24: note = Synthetic
  source 1..24: mol_type = other DNA
tgttgcgtatggagttaagagtac

SEQ ID NO: 8961 - DNA, 24 bp, synthetic construct
  misc_feature 1..24: note = Synthetic
  source 1..24: mol_type = other DNA
cgaacactactgagaggaatcaca

SEQ ID NO: 8962 - DNA, 24 bp, synthetic construct
  misc_feature 1..24: note = Synthetic
  source 1..24: mol_type = other DNA
gacgtccatcgcatctggcgaagt

SEQ ID NO: 8963 - DNA, 24 bp, synthetic construct
  misc_feature 1..24: note = Synthetic
  source 1..24: mol_type = other DNA
gtggcctgtgcggacgggtctaac

SEQ ID NO: 8964 - DNA, 24 bp, synthetic construct
  misc_feature 1..24: note = Synthetic
  source 1..24: mol_type = other DNA
accgaggatcaaggagcgctcttt

SEQ ID NO: 8965 - DNA, 24 bp, synthetic construct
  misc_feature 1..24: note = Synthetic
  source 1..24: mol_type = other DNA
gctcttgtgactaacaagtccagt

SEQ ID NO: 8966 - DNA, 24 bp, synthetic construct
  misc_feature 1..24: note = Synthetic
  source 1..24: mol_type = other DNA
cagtactccatctgcgaggatacc

SEQ ID NO: 8967 - DNA, 24 bp, synthetic construct
  misc_feature 1..24: note = Synthetic
  source 1..24: mol_type = other DNA
taatcttagcgtcacttcttggaa

SEQ ID NO: 8968 - DNA, 24 bp, synthetic construct
  misc_feature 1..24: note = Synthetic
  source 1..24: mol_type = other DNA
ctgcaaggttcagggcggatccct

SEQ ID NO: 8969 - DNA, 24 bp, synthetic construct
  misc_feature 1..24: note = Synthetic
  source 1..24: mol_type = other DNA
ggtacctctgaagtcaaggacagg

SEQ ID NO: 8970 - DNA, 24 bp, synthetic construct
  misc_feature 1..24: note = Synthetic
  source 1..24: mol_type = other DNA
ctctgagtccttcgaccgaaatta

SEQ ID NO: 8971 - DNA, 24 bp, synthetic construct
  misc_feature 1..24: note = Synthetic
  source 1..24: mol_type = other DNA
gtcggacgtaccgtcaggatgaac

SEQ ID NO: 8972 - DNA, 24 bp, synthetic construct
  misc_feature 1..24: note = Synthetic
  source 1..24: mol_type = other DNA
ttggatctcgacggacacgactgt

SEQ ID NO: 8973 - DNA, 24 bp, synthetic construct
  misc_feature 1..24: note = Synthetic
  source 1..24: mol_type = other DNA
gtgcctacccactagaagaactac

SEQ ID NO: 8974 - DNA, 24 bp, synthetic construct
  misc_feature 1..24: note = Synthetic
  source 1..24: mol_type = other DNA
catgtggccatgaggatttgcgat

SEQ ID NO: 8975 - DNA, 24 bp, synthetic construct
  misc_feature 1..24: note = Synthetic
  source 1..24: mol_type = other DNA
taactaacccgatcattggagtcc

SEQ ID NO: 8976 - DNA, 24 bp, synthetic construct
  misc_feature 1..24: note = Synthetic
  source 1..24: mol_type = other DNA
gagcgcacggccctaatctgaaga

SEQ ID NO: 8977 - DNA, 24 bp, synthetic construct
  misc_feature 1..24: note = Synthetic
  source 1..24: mol_type = other DNA
ctctaattaagccacagaccaaga

SEQ ID NO: 8978 - DNA, 24 bp, synthetic construct
  misc_feature 1..24: note = Synthetic
  source 1..24: mol_type = other DNA
aaacttacttcgggaatcaggtgt

SEQ ID NO: 8979 - DNA, 24 bp, synthetic construct
  misc_feature 1..24: note = Synthetic
  source 1..24: mol_type = other DNA
cctaacctacaccaacattaatga

SEQ ID NO: 8980 - DNA, 24 bp, synthetic construct
  misc_feature 1..24: note = Synthetic
  source 1..24: mol_type = other DNA
cggattcgcctacacccacagagg

SEQ ID NO: 8981 - DNA, 24 bp, synthetic construct
  misc_feature 1..24: note = Synthetic
  source 1..24: mol_type = other DNA
ggcgcgtggcactgatgacccaag

SEQ ID NO: 8982 - DNA, 24 bp, synthetic construct
  misc_feature 1..24: note = Synthetic
  source 1..24: mol_type = other DNA
cctacaaggcgtagccttgtaggg

SEQ ID NO: 8983 - DNA, 24 bp, synthetic construct
  misc_feature 1..24: note = Synthetic
  source 1..24: mol_type = other DNA
gacttgagggtttggccctcgtct

SEQ ID NO: 8984 - DNA, 24 bp, synthetic construct
  misc_feature 1..24: note = Synthetic
  source 1..24: mol_type = other DNA
ggcttacacgtcttaccaagccct

SEQ ID NO: 8985 - DNA, 24 bp, synthetic construct
  misc_feature 1..24: note = Synthetic
  source 1..24: mol_type = other DNA
actcatgtcctgctagcctcctgc

SEQ ID NO: 8986 - DNA, 24 bp, synthetic construct
  misc_feature 1..24: note = Synthetic
  source 1..24: mol_type = other DNA
cgaagggccgaatgtatgtgagag

SEQ ID NO: 8987 - DNA, 24 bp, synthetic construct
  misc_feature 1..24: note = Synthetic
  source 1..24: mol_type = other DNA
cttacacacgttcatgtgtcgttg

SEQ ID NO: 8988 - DNA, 24 bp, synthetic construct
  misc_feature 1..24: note = Synthetic
  source 1..24: mol_type = other DNA
tgagacatatagatgcgcttgcga

SEQ ID NO: 8989 - DNA, 24 bp, synthetic construct
  misc_feature 1..24: note = Synthetic
  source 1..24: mol_type = other DNA
tacgtcgtccgcgcctcctcacac

SEQ ID NO: 8990 - DNA, 24 bp, synthetic construct
  misc_feature 1..24: note = Synthetic
  source 1..24: mol_type = other DNA
tctttggaagaattaaccggttgg

SEQ ID NO: 8991 - DNA, 24 bp, synthetic construct
  misc_feature 1..24: note = Synthetic
  source 1..24: mol_type = other DNA
aataagtgcggatcgccgcggagt

SEQ ID NO: 8992 - DNA, 24 bp, synthetic construct
  misc_feature 1..24: note = Synthetic
  source 1..24: mol_type = other DNA
caaccttagacctaaggaacggaa

SEQ ID NO: 8993 - DNA, 24 bp, synthetic construct
  misc_feature 1..24: note = Synthetic
  source 1..24: mol_type = other DNA
gagcggctgtgctggaccatgctt

SEQ ID NO: 8994 - DNA, 24 bp, synthetic construct
  misc_feature 1..24: note = Synthetic
  source 1..24: mol_type = other DNA
ggccctaacaccgcccgttcgacc

SEQ ID NO: 8995 - DNA, 24 bp, synthetic construct
  misc_feature 1..24: note = Synthetic
  source 1..24: mol_type = other DNA
ttggcatcctagcggctgtaactg

SEQ ID NO: 8996 - DNA, 24 bp, synthetic construct
  misc_feature 1..24: note = Synthetic
  source 1..24: mol_type = other DNA
acggagacctacactgggtagact

SEQ ID NO: 8997 - DNA, 24 bp, synthetic construct
  misc_feature 1..24: note = Synthetic
  source 1..24: mol_type = other DNA
ttatgcagaagcgtgattaggaca

SEQ ID NO: 8998 - DNA, 24 bp, synthetic construct
  misc_feature 1..24: note = Synthetic
  source 1..24: mol_type = other DNA
tttgttatatattaacaacgatcc

SEQ ID NO: 8999 - DNA, 24 bp, synthetic construct
  misc_feature 1..24: note = Synthetic
  source 1..24: mol_type = other DNA
ttcgtttctggataaagagaaact

SEQ ID NO: 9000 - DNA, 24 bp, synthetic construct
  misc_feature 1..24: note = Synthetic
  source 1..24: mol_type = other DNA
ggcgccgtcggcgctggatgcagc

SEQ ID NO: 9001 - DNA, 24 bp, synthetic construct
  misc_feature 1..24: note = Synthetic
  source 1..24: mol_type = other DNA
tctaacgcttgtaacagccttgga

SEQ ID NO: 9002 - DNA, 24 bp, synthetic construct
  misc_feature 1..24: note = Synthetic
  source 1..24: mol_type = other DNA
taatcactattagaccactgaggg

SEQ ID NO: 9003 - DNA, 24 bp, synthetic construct
  misc_feature 1..24: note = Synthetic
  source 1..24: mol_type = other DNA
tctcctgaacagtcctatcccacc

SEQ ID NO: 9004 - DNA, 24 bp, synthetic construct
  misc_feature 1..24: note = Synthetic
  source 1..24: mol_type = other DNA
tcgatgttgcgtccgggctcatag

SEQ ID NO: 9005 - DNA, 24 bp, synthetic construct
  misc_feature 1..24: note = Synthetic
  source 1..24: mol_type = other DNA
ccactttcataactgcggaagacc

SEQ ID NO: 9006 - DNA, 24 bp, synthetic construct
  misc_feature 1..24: note = Synthetic
  source 1..24: mol_type = other DNA
tcagggtgggtaggcagtcctccg

SEQ ID NO: 9007 - DNA, 24 bp, synthetic construct
  misc_feature 1..24: note = Synthetic
  source 1..24: mol_type = other DNA
gatagctcagcactctgagtttac

SEQ ID NO: 9008 - DNA, 24 bp, synthetic construct
  misc_feature 1..24: note = Synthetic
  source 1..24: mol_type = other DNA
tatggtggttcggtccttggatag

SEQ ID NO: 9009 - DNA, 24 bp, synthetic construct
  misc_feature 1..24: note = Synthetic
  source 1..24: mol_type = other DNA
gttgttgtggagacttaacgcgtt

SEQ ID NO: 9010 - DNA, 24 bp, synthetic construct
  misc_feature 1..24: note = Synthetic
  source 1..24: mol_type = other DNA
aggaagcaatcgacggtctggtgc

SEQ ID NO: 9011 - DNA, 24 bp, synthetic construct
  misc_feature 1..24: note = Synthetic
  source 1..24: mol_type = other DNA
aggcacatatcggcgtttagatat

SEQ ID NO: 9012 - DNA, 24 bp, synthetic construct
  misc_feature 1..24: note = Synthetic
  source 1..24: mol_type = other DNA
tgcgagacattcacagggagcaca

SEQ ID NO: 9013 - DNA, 24 bp, synthetic construct
  misc_feature 1..24: note = Synthetic
  source 1..24: mol_type = other DNA
acgtgctttcatagttacactttg

SEQ ID NO: 9014 - DNA, 24 bp, synthetic construct
  misc_feature 1..24: note = Synthetic
  source 1..24: mol_type = other DNA
gcctttggaaccgggcctgaaaca

SEQ ID NO: 9015 - DNA, 24 bp, synthetic construct
  misc_feature 1..24: note = Synthetic
  source 1..24: mol_type = other DNA
aagtcacccgttcgcgtatcgttg

SEQ ID NO: 9016 - DNA, 24 bp, synthetic construct
  misc_feature 1..24: note = Synthetic
  source 1..24: mol_type = other DNA
agcgtggcgaggcgatccgcgagg

SEQ ID NO: 9017 - DNA, 24 bp, synthetic construct
  misc_feature 1..24: note = Synthetic
  source 1..24: mol_type = other DNA
aggttcgttcaagaggcagtttcg

SEQ ID NO: 9018 - DNA, 24 bp, synthetic construct
  misc_feature 1..24: note = Synthetic
  source 1..24: mol_type = other DNA
taagtactgtcgacctactgccca

SEQ ID NO: 9019 - DNA, 24 bp, synthetic construct
  misc_feature 1..24: note = Synthetic
  source 1..24: mol_type = other DNA
cgagaatggaatgcaaaggcggca

SEQ ID NO: 9020 - DNA, 24 bp, synthetic construct
  misc_feature 1..24: note = Synthetic
  source 1..24: mol_type = other DNA
tcgaggattgagcgcaccctgagg

SEQ ID NO: 9021 - DNA, 24 bp, synthetic construct
  misc_feature 1..24: note = Synthetic
  source 1..24: mol_type = other DNA
cgaagagctcagtgtctgacgagc

SEQ ID NO: 9022 - DNA, 24 bp, synthetic construct
  misc_feature 1..24: note = Synthetic
  source 1..24: mol_type = other DNA
acgaaggcgaattatgtaatataa

SEQ ID NO: 9023 - DNA, 24 bp, synthetic construct
  misc_feature 1..24: note = Synthetic
  source 1..24: mol_type = other DNA
gtctgtgagtgagctgctatcgga

SEQ ID NO: 9024 - DNA, 24 bp, synthetic construct
  misc_feature 1..24: note = Synthetic
  source 1..24: mol_type = other DNA
cagttctattattggcgtacattg

SEQ ID NO: 9025 - DNA, 24 bp, synthetic construct
  misc_feature 1..24: note = Synthetic
  source 1..24: mol_type = other DNA
taacgtcgagatgtgccgtttctt

SEQ ID NO: 9026 - DNA, 24 bp, synthetic construct
  misc_feature 1..24: note = Synthetic
  source 1..24: mol_type = other DNA
aggccaaagctattgtggacgctg

SEQ ID NO: 9027 - DNA, 24 bp, synthetic construct
  misc_feature 1..24: note = Synthetic
  source 1..24: mol_type = other DNA
tctgagcaagcaacgtgttagccg

SEQ ID NO: 9028 - DNA, 24 bp, synthetic construct
  misc_feature 1..24: note = Synthetic
  source 1..24: mol_type = other DNA
ctatccggtgcggaactgccacag

SEQ ID NO: 9029 - DNA, 24 bp, synthetic construct
  misc_feature 1..24: note = Synthetic
  source 1..24: mol_type = other DNA
gttcaacgcagggacacgacgcgg

SEQ ID NO: 9030 - DNA, 24 bp, synthetic construct
  misc_feature 1..24: note = Synthetic
  source 1..24: mol_type = other DNA
actacggctgcagttgcaacggca

SEQ ID NO: 9031 - DNA, 24 bp, synthetic construct
  misc_feature 1..24: note = Synthetic
  source 1..24: mol_type = other DNA
cagatgaatagggtgatcggactt

SEQ ID NO: 9032 - DNA, 24 bp, synthetic construct
  misc_feature 1..24: note = Synthetic
  source 1..24: mol_type = other DNA
gcgggatgctctggaaatatgcta

SEQ ID NO: 9033 - DNA, 24 bp, synthetic construct
  misc_feature 1..24: note = Synthetic
  source 1..24: mol_type = other DNA
gacacatccagcggcagcgtggac

SEQ ID NO: 9034 - DNA, 24 bp, synthetic construct
  misc_feature 1..24: note = Synthetic
  source 1..24: mol_type = other DNA
tggccgggaggccgctaggcgctt

SEQ ID NO: 9035 - DNA, 24 bp, synthetic construct
  misc_feature 1..24: note = Synthetic
  source 1..24: mol_type = other DNA
gcctaccttactgcggctttgctt

SEQ ID NO: 9036 - DNA, 24 bp, synthetic construct
  misc_feature 1..24: note = Synthetic
  source 1..24: mol_type = other DNA
tttgtcatatacaacaagcgttgt

SEQ ID NO: 9037 - DNA, 24 bp, synthetic construct
  misc_feature 1..24: note = Synthetic
  source 1..24: mol_type = other DNA
cgaccaggccacatccgcgggcct

SEQ ID NO: 9038 - DNA, 24 bp, synthetic construct
  misc_feature 1..24: note = Synthetic
  source 1..24: mol_type = other DNA
tatgtgttgaaataaagtctatag

SEQ ID NO: 9039 - DNA, 24 bp, synthetic construct
  misc_feature 1..24: note = Synthetic
  source 1..24: mol_type = other DNA
tgaaggcgatttaactgactctga

SEQ ID NO: 9040 - DNA, 24 bp, synthetic construct
  misc_feature 1..24: note = Synthetic
  source 1..24: mol_type = other DNA
tgtcggctccatgacgtcttaaac

SEQ ID NO: 9041 - DNA, 24 bp, synthetic construct
  misc_feature 1..24: note = Synthetic
  source 1..24: mol_type = other DNA
cctgcccactgatggtgaggagct

SEQ ID NO: 9042 - DNA, 24 bp, synthetic construct
  misc_feature 1..24: note = Synthetic
  source 1..24: mol_type = other DNA
gattcgcgtccctctaattaggtg

SEQ ID NO: 9043 - DNA, 24 bp, synthetic construct
  misc_feature 1..24: note = Synthetic
  source 1..24: mol_type = other DNA
tgtatttacagcggaagcgccaag

SEQ ID NO: 9044 - DNA, 24 bp, synthetic construct
  misc_feature 1..24: note = Synthetic
  source 1..24: mol_type = other DNA
caatgacagtgaggcactagtctc

SEQ ID NO: 9045 - DNA, 24 bp, synthetic construct
  misc_feature 1..24: note = Synthetic
  source 1..24: mol_type = other DNA
agggtaacatagaatccttaggct

SEQ ID NO: 9046 - DNA, 24 bp, synthetic construct
  misc_feature 1..24: note = Synthetic
  source 1..24: mol_type = other DNA
gcagattgcctgttcagcggcaaa

SEQ ID NO: 9047 - DNA, 24 bp, synthetic construct
  misc_feature 1..24: note = Synthetic
  source 1..24: mol_type = other DNA
attgggatgggctcgaggctagca

SEQ ID NO: 9048 - DNA, 24 bp, synthetic construct
  misc_feature 1..24: note = Synthetic
  source 1..24: mol_type = other DNA
gtaaagtcaacgtgccggtcgatt

SEQ ID NO: 9049 - DNA, 24 bp, synthetic construct
  misc_feature 1..24: note = Synthetic
  source 1..24: mol_type = other DNA
gcaattccggatgctttgtcgtgg

SEQ ID NO: 9050 - DNA, 24 bp, synthetic construct
  misc_feature 1..24: note = Synthetic
  source 1..24: mol_type = other DNA
ctgttgaggacagtggagccctct

SEQ ID NO: 9051 - DNA, 24 bp, synthetic construct
  misc_feature 1..24: note = Synthetic
  source 1..24: mol_type = other DNA
gattcatccagagacacgggcgac

SEQ ID NO: 9052 - DNA, 24 bp, synthetic construct
  misc_feature 1..24: note = Synthetic
  source 1..24: mol_type = other DNA
aacaatttgatagacagcccgtcg

SEQ ID NO: 9053 - DNA, 24 bp, synthetic construct
  misc_feature 1..24: note = Synthetic
  source 1..24: mol_type = other DNA
cttagcgcgtatcgtctgcttgtt

SEQ ID NO: 9054 - DNA, 24 bp, synthetic construct
  misc_feature 1..24: note = Synthetic
  source 1..24: mol_type = other DNA
acgtcaaatacttatggagacgta

SEQ ID NO: 9055 - DNA, 24 bp, synthetic construct
  misc_feature 1..24: note = Synthetic
  source 1..24: mol_type = other DNA
gtttcaacaaatatttgtctataa

SEQ ID NO: 9056 - DNA, 24 bp, synthetic construct
  misc_feature 1..24: note = Synthetic
  source 1..24: mol_type = other DNA
ctgacgtttgattccgccgtggca

SEQ ID NO: 9057 - DNA, 24 bp, synthetic construct
  misc_feature 1..24: note = Synthetic
  source 1..24: mol_type = other DNA
accgacgacaatcatgacgatcct

SEQ ID NO: 9058 - DNA, 24 bp, synthetic construct
  misc_feature 1..24: note = Synthetic
  source 1..24: mol_type = other DNA
gcctcgtttagttacgaccagaac

SEQ ID NO: 9059 - DNA, 24 bp, synthetic construct
  misc_feature 1..24: note = Synthetic
  source 1..24: mol_type = other DNA
aacgctccagcatgcccgctggaa

SEQ ID NO: 9060 - DNA, 24 bp, synthetic construct
  misc_feature 1..24: note = Synthetic
  source 1..24: mol_type = other DNA
gcgccgatagtctgcgtagcggac

SEQ ID NO: 9061 - DNA, 24 bp, synthetic construct
  misc_feature 1..24: note = Synthetic
  source 1..24: mol_type = other DNA
cgcagggctccaaatagacgacgc

SEQ ID NO: 9062 - DNA, 24 bp, synthetic construct
  misc_feature 1..24: note = Synthetic
  source 1..24: mol_type = other DNA
gatgggtcctactggatgcctcgt

SEQ ID NO: 9063 - DNA, 24 bp, synthetic construct
  misc_feature 1..24: note = Synthetic
  source 1..24: mol_type = other DNA
cgaaagttcatgaacaggttaagt

SEQ ID NO: 9064 - DNA, 24 bp, synthetic construct
  misc_feature 1..24: note = Synthetic
  source 1..24: mol_type = other DNA
agaatcggcgtaacacagctgcca

SEQ ID NO: 9065 - DNA, 24 bp, synthetic construct
  misc_feature 1..24: note = Synthetic
  source 1..24: mol_type = other DNA
cacagctacaaatagtcgcaccta

SEQ ID NO: 9066 - DNA, 24 bp, synthetic construct
  misc_feature 1..24: note = Synthetic
  source 1..24: mol_type = other DNA
tttgcgattgacccattgtggtgt

SEQ ID NO: 9067 - DNA, 24 bp, synthetic construct
  misc_feature 1..24: note = Synthetic
  source 1..24: mol_type = other DNA
tctgtaattaccctgctaagtagc

SEQ ID NO: 9068 - DNA, 24 bp, synthetic construct
  misc_feature 1..24: note = Synthetic
  source 1..24: mol_type = other DNA
tcctgcctgtacatgcctatgtat

SEQ ID NO: 9069 - DNA, 24 bp, synthetic construct
  misc_feature 1..24: note = Synthetic
  source 1..24: mol_type = other DNA
ctaggcgatggttagtcagctcaa

SEQ ID NO: 9070 - DNA, 24 bp, synthetic construct
  misc_feature 1..24: note = Synthetic
  source 1..24: mol_type = other DNA
tcggttctgggtattgtaacagtt

SEQ ID NO: 9071 - DNA, 24 bp, synthetic construct
  misc_feature 1..24: note = Synthetic
  source 1..24: mol_type = other DNA
actcccacagaacataagtcgttt

SEQ ID NO: 9072 - DNA, 24 bp, synthetic construct
  misc_feature 1..24: note = Synthetic
  source 1..24: mol_type = other DNA
agaaccgaagcaccttactatcac

SEQ ID NO: 9073 - DNA, 24 bp, synthetic construct
  misc_feature 1..24: note = Synthetic
  source 1..24: mol_type = other DNA
tagcacatgtttgcgtaaacctcg

SEQ ID NO: 9074 - DNA, 24 bp, synthetic construct
  misc_feature 1..24: note = Synthetic
  source 1..24: mol_type = other DNA
atagactcagaaatgagatgtgcc

SEQ ID NO: 9075 - DNA, 24 bp, synthetic construct
  misc_feature 1..24: note = Synthetic
  source 1..24: mol_type = other DNA
ttcctcagctggtggaagccattg

SEQ ID NO: 9076 - DNA, 24 bp, synthetic construct
  misc_feature 1..24: note = Synthetic
  source 1..24: mol_type = other DNA
tgcttagctcaggctcaactccta

SEQ ID NO: 9077 - DNA, 24 bp, synthetic construct
  misc_feature 1..24: note = Synthetic
  source 1..24: mol_type = other DNA
agtcgttagcgaggacatttagat

SEQ ID NO: 9078 - DNA, 24 bp, synthetic construct
  misc_feature 1..24: note = Synthetic
  source 1..24: mol_type = other DNA
actgaactgatcttggcgttatac

SEQ ID NO: 9079 - DNA, 24 bp, synthetic construct
  misc_feature 1..24: note = Synthetic
  source 1..24: mol_type = other DNA
ccgacggtgcgacgtctttcgttg

SEQ ID NO: 9080 - DNA, 24 bp, synthetic construct
  misc_feature 1..24: note = Synthetic
  source 1..24: mol_type = other DNA
tcagttgctgtgcgccttatccgt

SEQ ID NO: 9081 - DNA, 24 bp, synthetic construct
  misc_feature 1..24: note = Synthetic
  source 1..24: mol_type = other DNA
accaacgagaaagagttgctgctt

SEQ ID NO: 9082 - DNA, 24 bp, synthetic construct
  misc_feature 1..24: note = Synthetic
  source 1..24: mol_type = other DNA
ggctgatgtcagggatggtgtgac

SEQ ID NO: 9083 - DNA, 24 bp, synthetic construct
  misc_feature 1..24: note = Synthetic
  source 1..24: mol_type = other DNA
ctcaaactactactcaacgtcacc

SEQ ID NO: 9084 - DNA, 24 bp, synthetic construct
  misc_feature 1..24: note = Synthetic
  source 1..24: mol_type = other DNA
ttaggccaaacgcttcccgtaaca

SEQ ID NO: 9085 - DNA, 24 bp, synthetic construct
  misc_feature 1..24: note = Synthetic
  source 1..24: mol_type = other DNA
cgtgggtacaagtccgaacaggaa

SEQ ID NO: 9086 - DNA, 24 bp, synthetic construct
  misc_feature 1..24: note = Synthetic
  source 1..24: mol_type = other DNA
tctggtcagaaagggtcacatccg

SEQ ID NO: 9087 - DNA, 24 bp, synthetic construct
  misc_feature 1..24: note = Synthetic
  source 1..24: mol_type = other DNA
catgttgaacgtaccgttggtgaa

SEQ ID NO: 9088 - DNA, 24 bp, synthetic construct
  misc_feature 1..24: note = Synthetic
  source 1..24: mol_type = other DNA
cggttatgttctccaagatctgct

SEQ ID NO: 9089 - DNA, 24 bp, synthetic construct
  misc_feature 1..24: note = Synthetic
  source 1..24: mol_type = other DNA
gtatcgccaagcttaccacgtgtt

SEQ ID NO: 9090 - DNA, 24 bp, synthetic construct
  misc_feature 1..24: note = Synthetic
  source 1..24: mol_type = other DNA
gctgctagccaagtatatacgagg

SEQ ID NO: 9091 - DNA, 24 bp, synthetic construct
  misc_feature 1..24: note = Synthetic
  source 1..24: mol_type = other DNA
ttataacgtacgtctatgtgttcg

SEQ ID NO: 9092 - DNA, 24 bp, synthetic construct
  misc_feature 1..24: note = Synthetic
  source 1..24: mol_type = other DNA
gtgggcgcaagtagaagtgttggt

SEQ ID NO: 9093 - DNA, 24 bp, synthetic construct
  misc_feature 1..24: note = Synthetic
  source 1..24: mol_type = other DNA
tcgaaccagccggcttgcactaaa

SEQ ID NO: 9094 - DNA, 24 bp, synthetic construct
  misc_feature 1..24: note = Synthetic
  source 1..24: mol_type = other DNA
gcaccagcaattgtgtaccgaatt

SEQ ID NO: 9095 - DNA, 24 bp, synthetic construct
  misc_feature 1..24: note = Synthetic
  source 1..24: mol_type = other DNA
tcatataccacgtagagaagtact

SEQ ID NO: 9096 - DNA, 24 bp, synthetic construct
  misc_feature 1..24: note = Synthetic
  source 1..24: mol_type = other DNA
tgcccagaaggaacacactaatgg

SEQ ID NO: 9097 - DNA, 24 bp, synthetic construct
  misc_feature 1..24: note = Synthetic
  source 1..24: mol_type = other DNA
acgcatgggttgatgcgcggtagc

SEQ ID NO: 9098 - DNA, 24 bp, synthetic construct
  misc_feature 1..24: note = Synthetic
  source 1..24: mol_type = other DNA
gcggaacgacacaccaatccagtc

SEQ ID NO: 9099 - DNA, 24 bp, synthetic construct
  misc_feature 1..24: note = Synthetic
  source 1..24: mol_type = other DNA
gcatgtcgcttggaggcttctcgt

SEQ ID NO: 9100 - DNA, 24 bp, synthetic construct
  misc_feature 1..24: note = Synthetic
  source 1..24: mol_type = other DNA
gttgtaggtccgcgggcttgatag

SEQ ID NO: 9101 - DNA, 24 bp, synthetic construct
  misc_feature 1..24: note = Synthetic
  source 1..24: mol_type = other DNA
accataaactccttctcaacggtg

SEQ ID NO: 9102 - DNA, 24 bp, synthetic construct
  misc_feature 1..24: note = Synthetic
  source 1..24: mol_type = other DNA
cgggcttgcgctgcctgacctatc

SEQ ID NO: 9103 - DNA, 24 bp, synthetic construct
  misc_feature 1..24: note = Synthetic
  source 1..24: mol_type = other DNA
gtcagatttgtcgttgcgactggt

SEQ ID NO: 9104 - DNA, 24 bp, synthetic construct
  misc_feature 1..24: note = Synthetic
  source 1..24: mol_type = other DNA
ttgagtacgtacgagggttatgct

SEQ ID NO: 9105 - DNA, 24 bp, synthetic construct
  misc_feature 1..24: note = Synthetic
  source 1..24: mol_type = other DNA
ttgcgggcccgctcaaagtaagtc

SEQ ID NO: 9106 - DNA, 24 bp, synthetic construct
  misc_feature 1..24: note = Synthetic
  source 1..24: mol_type = other DNA
cggacgtagggcgtacggtccctt

SEQ ID NO: 9107 - DNA, 24 bp, synthetic construct
  misc_feature 1..24: note = Synthetic
  source 1..24: mol_type = other DNA
tcggaggtaaagattaggttacaa

SEQ ID NO: 9108 - DNA, 24 bp, synthetic construct
  misc_feature 1..24: note = Synthetic
  source 1..24: mol_type = other DNA
atcttatctccacctggcagagcc

SEQ ID NO: 9109 - DNA, 24 bp, synthetic construct
  misc_feature 1..24: note = Synthetic
  source 1..24: mol_type = other DNA
ctgtcgtagtccagtaaagaaggg

SEQ ID NO: 9110 - DNA, 24 bp, synthetic construct
  misc_feature 1..24: note = Synthetic
  source 1..24: mol_type = other DNA
ctcccgcgcgaactttgttctccg

SEQ ID NO: 9111 - DNA, 24 bp, synthetic construct
  misc_feature 1..24: note = Synthetic
  source 1..24: mol_type = other DNA
cgacgctatagttcaacgactctc

SEQ ID NO: 9112 - DNA, 24 bp, synthetic construct
  misc_feature 1..24: note = Synthetic
  source 1..24: mol_type = other DNA
cgagacggacgtaggaccatgcag

SEQ ID NO: 9113 - DNA, 24 bp, synthetic construct
  misc_feature 1..24: note = Synthetic
  source 1..24: mol_type = other DNA
gcatatatacagatccggatcgtc

SEQ ID NO: 9114 - DNA, 24 bp, synthetic construct
  misc_feature 1..24: note = Synthetic
  source 1..24: mol_type = other DNA
gtcgaaccgtcgaaaggcgaggat

SEQ ID NO: 9115 - DNA, 24 bp, synthetic construct
  misc_feature 1..24: note = Synthetic
  source 1..24: mol_type = other DNA
caagatatgggttaagcctgtccc

SEQ ID NO: 9116 - DNA, 24 bp, synthetic construct
  misc_feature 1..24: note = Synthetic
  source 1..24: mol_type = other DNA
gagttggatgtggcagagctagtc

SEQ ID NO: 9117 - DNA, 24 bp, synthetic construct
  misc_feature 1..24: note = Synthetic
  source 1..24: mol_type = other DNA
tcacgactctcgtttcagcagtcc

SEQ ID NO: 9118 - DNA, 24 bp, synthetic construct
  misc_feature 1..24: note = Synthetic
  source 1..24: mol_type = other DNA
cgggtatgtccatatggcgcctga

SEQ ID NO: 9119 - DNA, 24 bp, synthetic construct
  misc_feature 1..24: note = Synthetic
  source 1..24: mol_type = other DNA
caacacaagctagctgtggcggcg

SEQ ID NO: 9120 - DNA, 24 bp, synthetic construct
  misc_feature 1..24: note = Synthetic
  source 1..24: mol_type = other DNA
acttatacgagtgtgtagcatatt

SEQ ID NO: 9121 - DNA, 24 bp, synthetic construct
  misc_feature 1..24: note = Synthetic
  source 1..24: mol_type = other DNA
aatgttggccttactagttgctcg

SEQ ID NO: 9122 - DNA, 24 bp, synthetic construct
  misc_feature 1..24: note = Synthetic
  source 1..24: mol_type = other DNA
gacgacacaccgcgctgccgcgac

SEQ ID NO: 9123 - DNA, 24 bp, synthetic construct
  misc_feature 1..24: note = Synthetic
  source 1..24: mol_type = other DNA
tggtgagcaacgagcctccagtaa

SEQ ID NO: 9124 - DNA, 24 bp, synthetic construct
  misc_feature 1..24: note = Synthetic
  source 1..24: mol_type = other DNA
tttctccatggcttctatctatgc

SEQ ID NO: 9125 - DNA, 24 bp, synthetic construct
  misc_feature 1..24: note = Synthetic
  source 1..24: mol_type = other DNA
tacgtcacgccgcagctcctttct

SEQ ID NO: 9126 - DNA, 24 bp, synthetic construct
  misc_feature 1..24: note = Synthetic
  source 1..24: mol_type = other DNA
taacgcgggagtgcgggtgttgat

SEQ ID NO: 9127 - DNA, 24 bp, synthetic construct
  misc_feature 1..24: note = Synthetic
  source 1..24: mol_type = other DNA
cacgcgtggcatgtggatacagtg

SEQ ID NO: 9128 - DNA, 24 bp, synthetic construct
  misc_feature 1..24: note = Synthetic
  source 1..24: mol_type = other DNA
gtacattcggcctgtgggctcatt

SEQ ID NO: 9129 - DNA, 24 bp, synthetic construct
  misc_feature 1..24: note = Synthetic
  source 1..24: mol_type = other DNA
gcctcgacgtcgggcgctcatatt

SEQ ID NO: 9130 - DNA, 24 bp, synthetic construct
  misc_feature 1..24: note = Synthetic
  source 1..24: mol_type = other DNA
gtgcacctcgacatctagttatac

SEQ ID NO: 9131 - DNA, 24 bp, synthetic construct
  misc_feature 1..24: note = Synthetic
  source 1..24: mol_type = other DNA
ccgaacgggcgttgcatagtaaag

SEQ ID NO: 9132 - DNA, 24 bp, synthetic construct
  misc_feature 1..24: note = Synthetic
  source 1..24: mol_type = other DNA
cgatttcaccgggcactgccactt

SEQ ID NO: 9133 - DNA, 24 bp, synthetic construct
  misc_feature 1..24: note = Synthetic
  source 1..24: mol_type = other DNA
actttgggccgatttctgacgagt

SEQ ID NO: 9134 - DNA, 24 bp, synthetic construct
  misc_feature 1..24: note = Synthetic
  source 1..24: mol_type = other DNA
gtgtccgtttagtactgtttcacc

SEQ ID NO: 9135 - DNA, 24 bp, synthetic construct
  misc_feature 1..24: note = Synthetic
  source 1..24: mol_type = other DNA
gttatctttaatgaggcctccatg

SEQ ID NO: 9136 - DNA, 24 bp, synthetic construct
  misc_feature 1..24: note = Synthetic
  source 1..24: mol_type = other DNA
tactacgtcttcaaatgaacaggc

SEQ ID NO: 9137 - DNA, 24 bp, synthetic construct
  misc_feature 1..24: note = Synthetic
  source 1..24: mol_type = other DNA
tgtcccttaggctatgcattggga

SEQ ID NO: 9138 - DNA, 24 bp, synthetic construct
  misc_feature 1..24: note = Synthetic
  source 1..24: mol_type = other DNA
caggagttgcggtagagcccaatt

SEQ ID NO: 9139 - DNA, 24 bp, synthetic construct
  misc_feature 1..24: note = Synthetic
  source 1..24: mol_type = other DNA
ataagagacgacggtgccatatat

SEQ ID NO: 9140 - DNA, 24 bp, synthetic construct
  misc_feature 1..24: note = Synthetic
  source 1..24: mol_type = other DNA
taatggagcgtcgcatagggtttg

SEQ ID NO: 9141 - DNA, 24 bp, synthetic construct
  misc_feature 1..24: note = Synthetic
  source 1..24: mol_type = other DNA
tcttatccgtgaggtcggagccaa

SEQ ID NO: 9142 - DNA, 24 bp, synthetic construct
  misc_feature 1..24: note = Synthetic
  source 1..24: mol_type = other DNA
tgggacacgctatcgctcactgct

SEQ ID NO: 9143 - DNA, 24 bp, synthetic construct
  misc_feature 1..24: note = Synthetic
  source 1..24: mol_type = other DNA
gagacggcgttgtgaaaggaagag

SEQ ID NO: 9144 - DNA, 24 bp, synthetic construct
  misc_feature 1..24: note = Synthetic
  source 1..24: mol_type = other DNA
gcagaccgaggcacgcaactcatt

SEQ ID NO: 9145 - DNA, 24 bp, synthetic construct
  misc_feature 1..24: note = Synthetic
  source 1..24: mol_type = other DNA
ttagtcaccgttcctagttgaaag

SEQ ID NO: 9146 - DNA, 24 bp, synthetic construct
  misc_feature 1..24: note = Synthetic
  source 1..24: mol_type = other DNA
ttcagacaacaagcattataagat

SEQ ID NO: 9147 - DNA, 24 bp, synthetic construct
  misc_feature 1..24: note = Synthetic
  source 1..24: mol_type = other DNA
gtcgctggagagcaggctattgga

SEQ ID NO: 9148 - DNA, 24 bp, synthetic construct
  misc_feature 1..24: note = Synthetic
  source 1..24: mol_type = other DNA
ttagaggaacgatgtctactagtg

SEQ ID NO: 9149 - DNA, 24 bp, synthetic construct
  misc_feature 1..24: note = Synthetic
  source 1..24: mol_type = other DNA
accggaccaatcgtcggtaaggat

SEQ ID NO: 9150 - DNA, 24 bp, synthetic construct
  misc_feature 1..24: note = Synthetic
  source 1..24: mol_type = other DNA
taggattagaattaaggctcggac

SEQ ID NO: 9151 - DNA, 24 bp, synthetic construct
  misc_feature 1..24: note = Synthetic
  source 1..24: mol_type = other DNA
agaaagcggtctgctgtgttcgtc

SEQ ID NO: 9152 - DNA, 24 bp, synthetic construct
  misc_feature 1..24: note = Synthetic
  source 1..24: mol_type = other DNA
agcacttgaaacaccggagcaggt

SEQ ID NO: 9153 - DNA, 24 bp, synthetic construct
  misc_feature 1..24: note = Synthetic
  source 1..24: mol_type = other DNA
gtctggtggagtctcatagagtta

SEQ ID NO: 9154 - DNA, 24 bp, synthetic construct
  misc_feature 1..24: note = Synthetic
  source 1..24: mol_type = other DNA
aaacagacctgtaatagagtccct

SEQ ID NO: 9155 - DNA, 24 bp, synthetic construct
  misc_feature 1..24: note = Synthetic
  source 1..24: mol_type = other DNA
ttggaattgatttctctgacatcc

SEQ ID NO: 9156 - DNA, 24 bp, synthetic construct
  misc_feature 1..24: note = Synthetic
  source 1..24: mol_type = other DNA
ttccctatccaggaaatggatagt

SEQ ID NO: 9157 - DNA, 24 bp, synthetic construct
  misc_feature 1..24: note = Synthetic
  source 1..24: mol_type = other DNA
taacacaattcttggaatctgtag

SEQ ID NO: 9158 - DNA, 24 bp, synthetic construct
  misc_feature 1..24: note = Synthetic
  source 1..24: mol_type = other DNA
ataagttatcactcgagccgatcg

SEQ ID NO: 9159 - DNA, 24 bp, synthetic construct
  misc_feature 1..24: note = Synthetic
  source 1..24: mol_type = other DNA
tgtcgcaagactacaatccctcta

SEQ ID NO: 9160 - DNA, 24 bp, synthetic construct
  misc_feature 1..24: note = Synthetic
  source 1..24: mol_type = other DNA
taacatctgccatcccacgcgagc

SEQ ID NO: 9161 - DNA, 24 bp, synthetic construct
  misc_feature 1..24: note = Synthetic
  source 1..24: mol_type = other DNA
acctgggcctctggaactacactc

SEQ ID NO: 9162 - DNA, 24 bp, synthetic construct
  misc_feature 1..24: note = Synthetic
  source 1..24: mol_type = other DNA
gtgaatatagcaccgctggtttcg

SEQ ID NO: 9163 - DNA, 24 bp, synthetic construct
  misc_feature 1..24: note = Synthetic
  source 1..24: mol_type = other DNA
acgtatctgggtgtgttccagtct

SEQ ID NO: 9164 - DNA, 24 bp, synthetic construct
  misc_feature 1..24: note = Synthetic
  source 1..24: mol_type = other DNA
caccctcggatcatttgggataat

SEQ ID NO: 9165 - DNA, 24 bp, synthetic construct
  misc_feature 1..24: note = Synthetic
  source 1..24: mol_type = other DNA
gagtgtgttacctcgttgggcaca

SEQ ID NO: 9166 - DNA, 24 bp, synthetic construct
  misc_feature 1..24: note = Synthetic
  source 1..24: mol_type = other DNA
tggaagattagtgactttacccgt

SEQ ID NO: 9167 - DNA, 24 bp, synthetic construct
  misc_feature 1..24: note = Synthetic
  source 1..24: mol_type = other DNA
cgtgccacaggaaacagtatatga

SEQ ID NO: 9168 - DNA, 24 bp, synthetic construct
  misc_feature 1..24: note = Synthetic
  source 1..24: mol_type = other DNA
ccatttggtgcttgctatgacgag

SEQ ID NO: 9169 - DNA, 24 bp, synthetic construct
  misc_feature 1..24: note = Synthetic
  source 1..24: mol_type = other DNA
cgcctgcgcagtccaatagtaagc

SEQ ID NO: 9170 - DNA, 24 bp, synthetic construct
  misc_feature 1..24: note = Synthetic
  source 1..24: mol_type = other DNA
ccctctgtctttcctcatgcgatt

SEQ ID NO: 9171 - DNA, 24 bp, synthetic construct
  misc_feature 1..24: note = Synthetic
  source 1..24: mol_type = other DNA
tccttgttatgagcatgcaccaga

SEQ ID NO: 9172 - DNA, 24 bp, synthetic construct
  misc_feature 1..24: note = Synthetic
  source 1..24: mol_type = other DNA
acgctccagggactgattggacac

SEQ ID NO: 9173 - DNA, 24 bp, synthetic construct
  misc_feature 1..24: note = Synthetic
  source 1..24: mol_type = other DNA
acctcacacagggtgaagcatgga

SEQ ID NO: 9174 - DNA, 24 bp, synthetic construct
  misc_feature 1..24: note = Synthetic
  source 1..24: mol_type = other DNA
ttccacctctagttgagaggtaac

SEQ ID NO: 9175 - DNA, 24 bp, synthetic construct
  misc_feature 1..24: note = Synthetic
  source 1..24: mol_type = other DNA
accgctacggacatacacatcctc

SEQ ID NO: 9176 - DNA, 24 bp, synthetic construct
  misc_feature 1..24: note = Synthetic
  source 1..24: mol_type = other DNA
gttctattggaacacgggccaggc

SEQ ID NO: 9177 - DNA, 24 bp, synthetic construct
  misc_feature 1..24: note = Synthetic
  source 1..24: mol_type = other DNA
ctactgcgtatattgtgcgctgcg

SEQ ID NO: 9178 - DNA, 24 bp, synthetic construct
  misc_feature 1..24: note = Synthetic
  source 1..24: mol_type = other DNA
gaggcgatcgcagcatgccagatc

SEQ ID NO: 9179 - DNA, 24 bp, synthetic construct
  misc_feature 1..24: note = Synthetic
  source 1..24: mol_type = other DNA
ttaatacagatctaataagctcac

SEQ ID NO: 9180 - DNA, 24 bp, synthetic construct
  misc_feature 1..24: note = Synthetic
  source 1..24: mol_type = other DNA
actacccgcaggtacagagggccc

SEQ ID NO: 9181 - DNA, 24 bp, synthetic construct
  misc_feature 1..24: note = Synthetic
  source 1..24: mol_type = other DNA
aagagagtcggccctacgcgatga

SEQ ID NO: 9182 - DNA, 24 bp, synthetic construct
  misc_feature 1..24: note = Synthetic
  source 1..24: mol_type = other DNA
ccacgccttgaagttctagcctgc

SEQ ID NO: 9183 - DNA, 24 bp, synthetic construct
  misc_feature 1..24: note = Synthetic
  source 1..24: mol_type = other DNA
ctcgggagtgcaacttctctggca

SEQ ID NO: 9184 - DNA, 24 bp, synthetic construct
  misc_feature 1..24: note = Synthetic
  source 1..24: mol_type = other DNA
gtaacagctaagacttagttgttg

SEQ ID NO: 9185 - DNA, 24 bp, synthetic construct
  misc_feature 1..24: note = Synthetic
  source 1..24: mol_type = other DNA
accaggtatttgtatcagaacctg

SEQ ID NO: 9186 - DNA, 24 bp, synthetic construct
  misc_feature 1..24: note = Synthetic
  source 1..24: mol_type = other DNA
cgcacgccactgctacaatatttc

SEQ ID NO: 9187 - DNA, 24 bp, synthetic construct
  misc_feature 1..24: note = Synthetic
  source 1..24: mol_type = other DNA
agttgataggtgtatgtgttctac

SEQ ID NO: 9188 - DNA, 24 bp, synthetic construct
  misc_feature 1..24: note = Synthetic
  source 1..24: mol_type = other DNA
tgcgcgcacgtgaggtgtccaccg

SEQ ID NO: 9189 - DNA, 24 bp, synthetic construct
  misc_feature 1..24: note = Synthetic
  source 1..24: mol_type = other DNA
ggtcacgtcagttagcgaccaagc

SEQ ID NO: 9190 - DNA, 24 bp, synthetic construct
  misc_feature 1..24: note = Synthetic
  source 1..24: mol_type = other DNA
gtgctgagcagtgcctcccaatat

SEQ ID NO: 9191 - DNA, 24 bp, synthetic construct
  misc_feature 1..24: note = Synthetic
  source 1..24: mol_type = other DNA
agttcacaatcaactgagtactcc

SEQ ID NO: 9192 - DNA, 24 bp, synthetic construct
  misc_feature 1..24: note = Synthetic
  source 1..24: mol_type = other DNA
ctcagtcacacgcgaatcacgttt

SEQ ID NO: 9193 - DNA, 24 bp, synthetic construct
  misc_feature 1..24: note = Synthetic
  source 1..24: mol_type = other DNA
tcacattactttgagatacaaccc

SEQ ID NO: 9194 - DNA, 24 bp, synthetic construct
  misc_feature 1..24: note = Synthetic
  source 1..24: mol_type = other DNA
aatgttgccgcctgggctcgtttg

SEQ ID NO: 9195 - DNA, 24 bp, synthetic construct
  misc_feature 1..24: note = Synthetic
  source 1..24: mol_type = other DNA
gcctagcaatgttggcggtcagac

SEQ ID NO: 9196 - DNA, 24 bp, synthetic construct
  misc_feature 1..24: note = Synthetic
  source 1..24: mol_type = other DNA
ggacgctattgaggtaacccacgt

SEQ ID NO: 9197 - DNA, 24 bp, synthetic construct
  misc_feature 1..24: note = Synthetic
  source 1..24: mol_type = other DNA
aaaccggcaacttgcgtttccaaa

SEQ ID NO: 9198 - DNA, 24 bp, synthetic construct
  misc_feature 1..24: note = Synthetic
  source 1..24: mol_type = other DNA
cggtatgcaacaggaggcaagtcc

SEQ ID NO: 9199 - DNA, 24 bp, synthetic construct
  misc_feature 1..24: note = Synthetic
  source 1..24: mol_type = other DNA
atgagcccagaggccacctcgata

SEQ ID NO: 9200 - DNA, 24 bp, synthetic construct
  misc_feature 1..24: note = Synthetic
  source 1..24: mol_type = other DNA
atcgccaggagacacgtagttcat

SEQ ID NO: 9201 - DNA, 24 bp, synthetic construct
  misc_feature 1..24: note = Synthetic
  source 1..24: mol_type = other DNA
aagggatgaatagtaatgtcccga

SEQ ID NO: 9202 - DNA, 24 bp, synthetic construct
  misc_feature 1..24: note = Synthetic
  source 1..24: mol_type = other DNA
cgtcgcccatgtacaagctttgcg

SEQ ID NO: 9203 - DNA, 24 bp, synthetic construct
  misc_feature 1..24: note = Synthetic
  source 1..24: mol_type = other DNA
ttatttatattgtacatcttgaaa

SEQ ID NO: 9204 - DNA, 24 bp, synthetic construct
  misc_feature 1..24: note = Synthetic
  source 1..24: mol_type = other DNA
aagtgtgtgggtgccatggtatac

SEQ ID NO: 9205 - DNA, 24 bp, synthetic construct
  misc_feature 1..24: note = Synthetic
  source 1..24: mol_type = other DNA
gacacctccagatcgagctgttgt

SEQ ID NO: 9206 - DNA, 24 bp, synthetic construct
  misc_feature 1..24: note = Synthetic
  source 1..24: mol_type = other DNA
gtttcggctcctccctaggtcatc

SEQ ID NO: 9207 - DNA, 24 bp, synthetic construct
  misc_feature 1..24: note = Synthetic
  source 1..24: mol_type = other DNA
tgggtgaaccatactcatggcaaa

SEQ ID NO: 9208 - DNA, 24 bp, synthetic construct
  misc_feature 1..24: note = Synthetic
  source 1..24: mol_type = other DNA
ttggaggcgggaatagcgaactgc

SEQ ID NO: 9209 - DNA, 24 bp, synthetic construct
  misc_feature 1..24: note = Synthetic
  source 1..24: mol_type = other DNA
cggtcgcttaaggtcataatgggt

SEQ ID NO: 9210 - DNA, 24 bp, synthetic construct
  misc_feature 1..24: note = Synthetic
  source 1..24: mol_type = other DNA
tttctggcttggttcctttcagat

SEQ ID NO: 9211 - DNA, 24 bp, synthetic construct
  misc_feature 1..24: note = Synthetic
  source 1..24: mol_type = other DNA
gtgatacagactaaatcgccactt

SEQ ID NO: 9212 - DNA, 24 bp, synthetic construct
  misc_feature 1..24: note = Synthetic
  source 1..24: mol_type = other DNA
aaactcgcgtcgcgtaaattcggg

SEQ ID NO: 9213 - DNA, 24 bp, synthetic construct
  misc_feature 1..24: note = Synthetic
  source 1..24: mol_type = other DNA
ctatggatttgggctgtcggagcg

SEQ ID NO: 9214 - DNA, 24 bp, synthetic construct
  misc_feature 1..24: note = Synthetic
  source 1..24: mol_type = other DNA
tatgaggaatgctgtgagcatgag

SEQ ID NO: 9215 - DNA, 24 bp, synthetic construct
  misc_feature 1..24: note = Synthetic
  source 1..24: mol_type = other DNA
gttgtcgctaaccaactgcaaggc

SEQ ID NO: 9216 - DNA, 24 bp, synthetic construct
  misc_feature 1..24: note = Synthetic
  source 1..24: mol_type = other DNA
tacgcctcacatgtgaagatacta

SEQ ID NO: 9217 - DNA, 24 bp, synthetic construct
  misc_feature 1..24: note = Synthetic
  source 1..24: mol_type = other DNA
ggactaagagaggttccgatcgaa

SEQ ID NO: 9218 - DNA, 24 bp, synthetic construct
  misc_feature 1..24: note = Synthetic
  source 1..24: mol_type = other DNA
atcacaggttccctcaacatcatg

SEQ ID NO: 9219 - DNA, 24 bp, synthetic construct
  misc_feature 1..24: note = Synthetic
  source 1..24: mol_type = other DNA
gaggtaatacgttcaatacatagg

SEQ ID NO: 9220 - DNA, 24 bp, synthetic construct
  misc_feature 1..24: note = Synthetic
  source 1..24: mol_type = other DNA
tgtactctagcatactcgtgccat

SEQ ID NO: 9221 - DNA, 24 bp, synthetic construct
  misc_feature 1..24: note = Synthetic
  source 1..24: mol_type = other DNA
ttgagtgtctgtttggcttctcct

SEQ ID NO: 9222 - DNA, 24 bp, synthetic construct
  misc_feature 1..24: note = Synthetic
  source 1..24: mol_type = other DNA
ccaggaacctgtcaggctaattcg

SEQ ID NO: 9223 - DNA, 24 bp, synthetic construct
  misc_feature 1..24: note = Synthetic
  source 1..24: mol_type = other DNA
attgtagttattaattcggcgggt

SEQ ID NO: 9224 - DNA, 24 bp, synthetic construct
  misc_feature 1..24: note = Synthetic
  source 1..24: mol_type = other DNA
cgtcgagccatgggacagataggt

SEQ ID NO: 9225 - DNA, 24 bp, synthetic construct
  misc_feature 1..24: note = Synthetic
  source 1..24: mol_type = other DNA
gcatacgttcatccttatcgctat

SEQ ID NO: 9226 - DNA, 24 bp, synthetic construct
  misc_feature 1..24: note = Synthetic
  source 1..24: mol_type = other DNA
ggctttggttaatatcaacccggc

SEQ ID NO: 9227 - DNA, 24 bp, synthetic construct
  misc_feature 1..24: note = Synthetic
  source 1..24: mol_type = other DNA
tggacatcgggcggacggttgcac

SEQ ID NO: 9228 - DNA, 24 bp, synthetic construct
  misc_feature 1..24: note = Synthetic
  source 1..24: mol_type = other DNA
ttacttcgtgcacctacagcgcat

SEQ ID NO: 9229 - DNA, 24 bp, synthetic construct
  misc_feature 1..24: note = Synthetic
  source 1..24: mol_type = other DNA
atttgttcgtctagacgttgatag

SEQ ID NO: 9230 - DNA, 24 bp, synthetic construct
  misc_feature 1..24: note = Synthetic
  source 1..24: mol_type = other DNA
ttcgatgaaggagcgccgatatgc

SEQ ID NO: 9231 - DNA, 24 bp, synthetic construct
  misc_feature 1..24: note = Synthetic
  source 1..24: mol_type = other DNA
ggttggctatatgtttgtgctttg

SEQ ID NO: 9232 - DNA, 24 bp, synthetic construct
  misc_feature 1..24: note = Synthetic
  source 1..24: mol_type = other DNA
tagtcacattaacatgaaccagca

SEQ ID NO: 9233 - DNA, 24 bp, synthetic construct
  misc_feature 1..24: note = Synthetic
  source 1..24: mol_type = other DNA
ttagaggctgccctctttagccac

SEQ ID NO: 9234 - DNA, 24 bp, synthetic construct
  misc_feature 1..24: note = Synthetic
  source 1..24: mol_type = other DNA
tgttgcagggcgtttctgaagatg

SEQ ID NO: 9235 - DNA, 24 bp, synthetic construct
  misc_feature 1..24: note = Synthetic
  source 1..24: mol_type = other DNA
ttattgacgcacatatacgcttct

SEQ ID NO: 9236 - DNA, 24 bp, synthetic construct
  misc_feature 1..24: note = Synthetic
  source 1..24: mol_type = other DNA
tcttagtgataactgattgccggc

SEQ ID NO: 9237 - DNA, 24 bp, synthetic construct
  misc_feature 1..24: note = Synthetic
  source 1..24: mol_type = other DNA
acctcccacaggaccgttagaaag

SEQ ID NO: 9238 - DNA, 24 bp, synthetic construct
  misc_feature 1..24: note = Synthetic
  source 1..24: mol_type = other DNA
aagacaatcagcgagtgtcttaac

SEQ ID NO: 9239 - DNA, 24 bp, synthetic construct
  misc_feature 1..24: note = Synthetic
  source 1..24: mol_type = other DNA
actaaacctagcataatctgttag

SEQ ID NO: 9240 - DNA, 24 bp, synthetic construct
  misc_feature 1..24: note = Synthetic
  source 1..24: mol_type = other DNA
gttcaattccctagtgcggcactt

SEQ ID NO: 9241 - DNA, 24 bp, synthetic construct
  misc_feature 1..24: note = Synthetic
  source 1..24: mol_type = other DNA
catgtaatgagtgcttaaatgaaa

SEQ ID NO: 9242 - DNA, 24 bp, synthetic construct
  misc_feature 1..24: note = Synthetic
  source 1..24: mol_type = other DNA
gtttaagctgggttggccagtatt

SEQ ID NO: 9243 - DNA, 24 bp, synthetic construct
  misc_feature 1..24: note = Synthetic
  source 1..24: mol_type = other DNA
tcgcatccgcgacagacgcatgtg

SEQ ID NO: 9244 - DNA, 24 bp, synthetic construct
  misc_feature 1..24: note = Synthetic
  source 1..24: mol_type = other DNA
agatgttcactaagtcgatagcgg

SEQ ID NO: 9245 - DNA, 24 bp, synthetic construct
  misc_feature 1..24: note = Synthetic
  source 1..24: mol_type = other DNA
tgctgggagaaagctccaaatggt

SEQ ID NO: 9246 - DNA, 24 bp, synthetic construct
  misc_feature 1..24: note = Synthetic
  source 1..24: mol_type = other DNA
tgaccgaacacttaccgcctgtcc

SEQ ID NO: 9247 - DNA, 24 bp, synthetic construct
  misc_feature 1..24: note = Synthetic
  source 1..24: mol_type = other DNA
caggaagagcgaccaggcgagaga

SEQ ID NO: 9248 - DNA, 24 bp, synthetic construct
  misc_feature 1..24: note = Synthetic
  source 1..24: mol_type = other DNA
aacacgctggatccgccatgatgg

SEQ ID NO: 9249 - DNA, 24 bp, synthetic construct
  misc_feature 1..24: note = Synthetic
  source 1..24: mol_type = other DNA
cgtaaccggtgacacaggatacta

SEQ ID NO: 9250 - DNA, 24 bp, synthetic construct
  misc_feature 1..24: note = Synthetic
  source 1..24: mol_type = other DNA
tcggcaatgcaaatacgggctagt

SEQ ID NO: 9251 - DNA, 24 bp, synthetic construct
  misc_feature 1..24: note = Synthetic
  source 1..24: mol_type = other DNA
caatccagggatagtaaagtgata

SEQ ID NO: 9252 - DNA, 24 bp, synthetic construct
  misc_feature 1..24: note = Synthetic
  source 1..24: mol_type = other DNA
aggtcgtttaacgattagagatcc

SEQ ID NO: 9253 - DNA, 24 bp, synthetic construct
  misc_feature 1..24: note = Synthetic
  source 1..24: mol_type = other DNA
ttccgggtcaacttgtgatcgtag

SEQ ID NO: 9254 - DNA, 24 bp, synthetic construct
  misc_feature 1..24: note = Synthetic
  source 1..24: mol_type = other DNA
ctgggtggataaacgtcgcgtggt

SEQ ID NO: 9255 - DNA, 24 bp, synthetic construct
  misc_feature 1..24: note = Synthetic
  source 1..24: mol_type = other DNA
ttaaccatgccacgcctacattgt

SEQ ID NO: 9256 - DNA, 24 bp, synthetic construct
  misc_feature 1..24: note = Synthetic
  source 1..24: mol_type = other DNA
ggtaacggatcttacagtcaagat

SEQ ID NO: 9257 - DNA, 24 bp, synthetic construct
  misc_feature 1..24: note = Synthetic
  source 1..24: mol_type = other DNA
aaggtctgtgatgcgagtcctaat

SEQ ID NO: 9258 - DNA, 24 bp, synthetic construct
  misc_feature 1..24: note = Synthetic
  source 1..24: mol_type = other DNA
atagtagcaagtgacgtggaggct

SEQ ID NO: 9259 - DNA, 24 bp, synthetic construct
  misc_feature 1..24: note = Synthetic
  source 1..24: mol_type = other DNA
ccggtgtgtccagggcctcgacaa

SEQ ID NO: 9260 - DNA, 24 bp, synthetic construct
  misc_feature 1..24: note = Synthetic
  source 1..24: mol_type = other DNA
gctcccactcctcgatggtcgcaa

SEQ ID NO: 9261 - DNA, 24 bp, synthetic construct
  misc_feature 1..24: note = Synthetic
  source 1..24: mol_type = other DNA
attgattcgggtcctctgtaataa

SEQ ID NO: 9262 - DNA, 24 bp, synthetic construct
  misc_feature 1..24: note = Synthetic
  source 1..24: mol_type = other DNA
cataaactccctattggcctctct

SEQ ID NO: 9263 - DNA, 24 bp, synthetic construct
  misc_feature 1..24: note = Synthetic
  source 1..24: mol_type = other DNA
gaatgacctgtgttgtggtcgtgg

SEQ ID NO: 9264 - DNA, 24 bp, synthetic construct
  misc_feature 1..24: note = Synthetic
  source 1..24: mol_type = other DNA
gtggacttccagtatcgttagtaa

SEQ ID NO: 9265 - DNA, 24 bp, synthetic construct
  misc_feature 1..24: note = Synthetic
  source 1..24: mol_type = other DNA
tgctgataagggccgaccctggcc

SEQ ID NO: 9266 - DNA, 24 bp, synthetic construct
  misc_feature 1..24: note = Synthetic
  source 1..24: mol_type = other DNA
atctactaattgacagtcgtccca

SEQ ID NO: 9267 - DNA, 24 bp, synthetic construct
  misc_feature 1..24: note = Synthetic
  source 1..24: mol_type = other DNA
aaggcacgggtcggcctcttcgtt

SEQ ID NO: 9268 - DNA, 24 bp, synthetic construct
  misc_feature 1..24: note = Synthetic
  source 1..24: mol_type = other DNA
cctaccgcaaacatttaaggtatt

SEQ ID NO: 9269 - DNA, 24 bp, synthetic construct
  misc_feature 1..24: note = Synthetic
  source 1..24: mol_type = other DNA
tgccgctcgcacgttcccttcagg

SEQ ID NO: 9270 - DNA, 24 bp, synthetic construct
  misc_feature 1..24: note = Synthetic
  source 1..24: mol_type = other DNA
agcatcaacgcgcccgctagacgg

SEQ ID NO: 9271 - DNA, 24 bp, synthetic construct
  misc_feature 1..24: note = Synthetic
  source 1..24: mol_type = other DNA
tatcgcgcttaaagtcgttgccat

SEQ ID NO: 9272 - DNA, 24 bp, synthetic construct
  misc_feature 1..24: note = Synthetic
  source 1..24: mol_type = other DNA
caatgtatatcttaatagtatggt

SEQ ID NO: 9273 - DNA, 24 bp, synthetic construct
  misc_feature 1..24: note = Synthetic
  source 1..24: mol_type = other DNA
cgtgtgtttacatgcgactcattt

SEQ ID NO: 9274 - DNA, 24 bp, synthetic construct
  misc_feature 1..24: note = Synthetic
  source 1..24: mol_type = other DNA
gctgagtgggcggtctggcaactt

SEQ ID NO: 9275 - DNA, 24 bp, synthetic construct
  misc_feature 1..24: note = Synthetic
  source 1..24: mol_type = other DNA
gctcactccgaagccaaggaatcc

SEQ ID NO: 9276 - DNA, 24 bp, synthetic construct
  misc_feature 1..24: note = Synthetic
  source 1..24: mol_type = other DNA
actgcgcacagagagcgtatccta

SEQ ID NO: 9277 - DNA, 24 bp, synthetic construct
  misc_feature 1..24: note = Synthetic
  source 1..24: mol_type = other DNA
ctctaactccggcggcgtatctta

SEQ ID NO: 9278 - DNA, 24 bp, synthetic construct
  misc_feature 1..24: note = Synthetic
  source 1..24: mol_type = other DNA
gtagacatgttcaatcaacgcaaa

SEQ ID NO: 9279 - DNA, 24 bp, synthetic construct
  misc_feature 1..24: note = Synthetic
  source 1..24: mol_type = other DNA
tatcgggatggcaacagtgtacac

SEQ ID NO: 9280 - DNA, 24 bp, synthetic construct
  misc_feature 1..24: note = Synthetic
  source 1..24: mol_type = other DNA
gcattgacacgcggcaggcacaga

SEQ ID NO: 9281 - DNA, 24 bp, synthetic construct
  misc_feature 1..24: note = Synthetic
  source 1..24: mol_type = other DNA
cttggctgtgcatcaaatcaaatc

SEQ ID NO: 9282 - DNA, 24 bp, synthetic construct
  misc_feature 1..24: note = Synthetic
  source 1..24: mol_type = other DNA
agtctgagcgaataggaacaagac

SEQ ID NO: 9283 - DNA, 24 bp, synthetic construct
  misc_feature 1..24: note = Synthetic
  source 1..24: mol_type = other DNA
gtcccgttataatgcccatttcgt

SEQ ID NO: 9284 - DNA, 24 bp, synthetic construct
  misc_feature 1..24: note = Synthetic
  source 1..24: mol_type = other DNA
gttagcttggctcactaagacacg

SEQ ID NO: 9285 - DNA, 24 bp, synthetic construct
  misc_feature 1..24: note = Synthetic
  source 1..24: mol_type = other DNA
ggtacgtctattacatctgttgag

SEQ ID NO: 9286 - DNA, 24 bp, synthetic construct
  misc_feature 1..24: note = Synthetic
  source 1..24: mol_type = other DNA
atgaccggaggttagaagccatga

SEQ ID NO: 9287 - DNA, 24 bp, synthetic construct
  misc_feature 1..24: note = Synthetic
  source 1..24: mol_type = other DNA
gcgtgtgacgctcctaagcccgca

SEQ ID NO: 9288 - DNA, 24 bp, synthetic construct
  misc_feature 1..24: note = Synthetic
  source 1..24: mol_type = other DNA
aaagctgcttgaggaaggtacgct

SEQ ID NO: 9289 - DNA, 24 bp, synthetic construct
  misc_feature 1..24: note = Synthetic
  source 1..24: mol_type = other DNA
ggtatcgagaccttatcacctgcg

SEQ ID NO: 9290 - DNA, 24 bp, synthetic construct
  misc_feature 1..24: note = Synthetic
  source 1..24: mol_type = other DNA
gcgacgacggttacatcgtgatat

SEQ ID NO: 9291 - DNA, 24 bp, synthetic construct
  misc_feature 1..24: note = Synthetic
  source 1..24: mol_type = other DNA
aacatctaatatcatatccgaaga

SEQ ID NO: 9292 - DNA, 24 bp, synthetic construct
  misc_feature 1..24: note = Synthetic
  source 1..24: mol_type = other DNA
gctaagtctacttacaatgtcaat

SEQ ID NO: 9293 - DNA, 24 bp, synthetic construct
  misc_feature 1..24: note = Synthetic
  source 1..24: mol_type = other DNA
tactctatgccgagacaccgtcaa

SEQ ID NO: 9294 - DNA, 24 bp, synthetic construct
  misc_feature 1..24: note = Synthetic
  source 1..24: mol_type = other DNA
actcggcgtaatagctctagtaag

SEQ ID NO: 9295 - DNA, 24 bp, synthetic construct
  misc_feature 1..24: note = Synthetic
  source 1..24: mol_type = other DNA
ggctgccatcatgtaccaactggc

SEQ ID NO: 9296 - DNA, 24 bp, synthetic construct
  misc_feature 1..24: note = Synthetic
  source 1..24: mol_type = other DNA
tcgtgttgcggcccacctagagct

SEQ ID NO: 9297 - DNA, 24 bp, synthetic construct
  misc_feature 1..24: note = Synthetic
  source 1..24: mol_type = other DNA
tgatgggcccgttagagagccagt

SEQ ID NO: 9298 - DNA, 24 bp, synthetic construct
  misc_feature 1..24: note = Synthetic
  source 1..24: mol_type = other DNA
tcatctcggtgtcatgtattgttg

SEQ ID NO: 9299 - DNA, 24 bp, synthetic construct
  misc_feature 1..24: note = Synthetic
  source 1..24: mol_type = other DNA
gctaacccgactcttcggtataac

SEQ ID NO: 9300 - DNA, 24 bp, synthetic construct
  misc_feature 1..24: note = Synthetic
  source 1..24: mol_type = other DNA
gacagctgggacatatgcgaatgg

SEQ ID NO: 9301 - DNA, 24 bp, synthetic construct
  misc_feature 1..24: note = Synthetic
  source 1..24: mol_type = other DNA
ttcccattactgacagaggccagt

SEQ ID NO: 9302 - DNA, 24 bp, synthetic construct
  misc_feature 1..24: note = Synthetic
  source 1..24: mol_type = other DNA
aggtctataaccttccacggacct

SEQ ID NO: 9303 - DNA, 24 bp, synthetic construct
  misc_feature 1..24: note = Synthetic
  source 1..24: mol_type = other DNA
atacatgtctcgtaatgagtggtg

SEQ ID NO: 9304 - DNA, 24 bp, synthetic construct
  misc_feature 1..24: note = Synthetic
  source 1..24: mol_type = other DNA
gaaaccgtgagccgtgctggctag

SEQ ID NO: 9305 - DNA, 24 bp, synthetic construct
  misc_feature 1..24: note = Synthetic
  source 1..24: mol_type = other DNA
ttgcacagtaacgcgtactggtcc

SEQ ID NO: 9306 - DNA, 24 bp, synthetic construct
  misc_feature 1..24: note = Synthetic
  source 1..24: mol_type = other DNA
cgcagtagagttaaagcctacagc

SEQ ID NO: 9307 - DNA, 24 bp, synthetic construct
  misc_feature 1..24: note = Synthetic
  source 1..24: mol_type = other DNA
ccatggttgctaggattaatctgc

SEQ ID NO: 9308 - DNA, 24 bp, synthetic construct
  misc_feature 1..24: note = Synthetic
  source 1..24: mol_type = other DNA
atacttgtgtgaggttagcagctc

SEQ ID NO: 9309 - DNA, 24 bp, synthetic construct
  misc_feature 1..24: note = Synthetic
  source 1..24: mol_type = other DNA
gccttgcttctagtattacagacg

SEQ ID NO: 9310 - DNA, 24 bp, synthetic construct
  misc_feature 1..24: note = Synthetic
  source 1..24: mol_type = other DNA
cgacttagtctgtctcgattcgcg

SEQ ID NO: 9311 - DNA, 24 bp, synthetic construct
  misc_feature 1..24: note = Synthetic
  source 1..24: mol_type = other DNA
gatgtgtctggaggctgacgggaa

SEQ ID NO: 9312 - DNA, 24 bp, synthetic construct
  misc_feature 1..24: note = Synthetic
  source 1..24: mol_type = other DNA
gtatatgggttgttgccaataata

SEQ ID NO: 9313 - DNA, 24 bp, synthetic construct
  misc_feature 1..24: note = Synthetic
  source 1..24: mol_type = other DNA
cgcggcaataatacgaacatctct

SEQ ID NO: 9314 - DNA, 24 bp, synthetic construct
  misc_feature 1..24: note = Synthetic
  source 1..24: mol_type = other DNA
tgcagatcagtatacattgtaatc

SEQ ID NO: 9315 - DNA, 24 bp, synthetic construct
  misc_feature 1..24: note = Synthetic
  source 1..24: mol_type = other DNA
gatggaatgagctcgtaagaagga

SEQ ID NO: 9316 - DNA, 24 bp, synthetic construct
  misc_feature 1..24: note = Synthetic
  source 1..24: mol_type = other DNA
tcgcgtagacgacgttcttgacta

SEQ ID NO: 9317 - DNA, 24 bp, synthetic construct
  misc_feature 1..24: note = Synthetic
  source 1..24: mol_type = other DNA
agtgactaacgctacgtcgagcct

SEQ ID NO: 9318 - DNA, 24 bp, synthetic construct
  misc_feature 1..24: note = Synthetic
  source 1..24: mol_type = other DNA
ctgaccatttggttctctcacgcc

SEQ ID NO: 9319 - DNA, 24 bp, synthetic construct
  misc_feature 1..24: note = Synthetic
  source 1..24: mol_type = other DNA
aagtttaggatacactgcacagga

SEQ ID NO: 9320 - DNA, 24 bp, synthetic construct
  misc_feature 1..24: note = Synthetic
  source 1..24: mol_type = other DNA
tcctttctcctaccgataaattta

SEQ ID NO: 9321 - DNA, 24 bp, synthetic construct
  misc_feature 1..24: note = Synthetic
  source 1..24: mol_type = other DNA
cgtttaggtaccgctattgagctt

SEQ ID NO: 9322 - DNA, 24 bp, synthetic construct
  misc_feature 1..24: note = Synthetic
  source 1..24: mol_type = other DNA
gagtgcaccgcactattaccatgc

SEQ ID NO: 9323 - DNA, 24 bp, synthetic construct
  misc_feature 1..24: note = Synthetic
  source 1..24: mol_type = other DNA
cagagggtgttggatttatatccg

SEQ ID NO: 9324 - DNA, 24 bp, synthetic construct
  misc_feature 1..24: note = Synthetic
  source 1..24: mol_type = other DNA
agaggagtctccgaacgaagccaa

SEQ ID NO: 9325 - DNA, 24 bp, synthetic construct
  misc_feature 1..24: note = Synthetic
  source 1..24: mol_type = other DNA
aatacaacccgcgtaggcgttgag

SEQ ID NO: 9326 - DNA, 24 bp, synthetic construct
  misc_feature 1..24: note = Synthetic
  source 1..24: mol_type = other DNA
tagctaggatcaacgagttcgtgc

SEQ ID NO: 9327 - DNA, 24 bp, synthetic construct
  misc_feature 1..24: note = Synthetic
  source 1..24: mol_type = other DNA
gggatctgtgttgctgtacagaga

SEQ ID NO: 9328 - DNA, 24 bp, synthetic construct
  misc_feature 1..24: note = Synthetic
  source 1..24: mol_type = other DNA
cgggagtacggataggacgcaaag

SEQ ID NO: 9329 - DNA, 24 bp, synthetic construct
  misc_feature 1..24: note = Synthetic
  source 1..24: mol_type = other DNA
tgcgtgtgagtatagtacgcgtct

SEQ ID NO: 9330 - DNA, 24 bp, synthetic construct
  misc_feature 1..24: note = Synthetic
  source 1..24: mol_type = other DNA
ctcgtggataacttagtcctgacg

SEQ ID NO: 9331 - DNA, 24 bp, synthetic construct
  misc_feature 1..24: note = Synthetic
  source 1..24: mol_type = other DNA
gcgtcagtcactaattcaggacca

SEQ ID NO: 9332 - DNA, 24 bp, synthetic construct
  misc_feature 1..24: note = Synthetic
  source 1..24: mol_type = other DNA
taagacgacactggtttgaaacgg

SEQ ID NO: 9333 - DNA, 24 bp, synthetic construct
  misc_feature 1..24: note = Synthetic
  source 1..24: mol_type = other DNA
cagcgtgtctcgtcctctgatgtc

SEQ ID NO: 9334 - DNA, 24 bp, synthetic construct
  misc_feature 1..24: note = Synthetic
  source 1..24: mol_type = other DNA
ataatataagaggttacacgccgt

SEQ ID NO: 9335 - DNA, 24 bp, synthetic construct
  misc_feature 1..24: note = Synthetic
  source 1..24: mol_type = other DNA
acattacgtgatcggtagatagcg

SEQ ID NO: 9336 - DNA, 24 bp, synthetic construct
  misc_feature 1..24: note = Synthetic
  source 1..24: mol_type = other DNA
cagcctttcctccaactatgactg

SEQ ID NO: 9337 - DNA, 24 bp, synthetic construct
  misc_feature 1..24: note = Synthetic
  source 1..24: mol_type = other DNA
gcgggctttcactactttactaag

SEQ ID NO: 9338 - DNA, 24 bp, synthetic construct
  misc_feature 1..24: note = Synthetic
  source 1..24: mol_type = other DNA
ccgcagttgatggaggagtgcgga

SEQ ID NO: 9339 - DNA, 24 bp, synthetic construct
  misc_feature 1..24: note = Synthetic
  source 1..24: mol_type = other DNA
gaaatagtgattgatccctaggcg

SEQ ID NO: 9340 - DNA, 24 bp, synthetic construct
  misc_feature 1..24: note = Synthetic
  source 1..24: mol_type = other DNA
tcttccacgggccgctaatagcct

SEQ ID NO: 9341 - DNA, 24 bp, synthetic construct
  misc_feature 1..24: note = Synthetic
  source 1..24: mol_type = other DNA
ggtaaatacggatctagctgagcg

SEQ ID NO: 9342 - DNA, 24 bp, synthetic construct
  misc_feature 1..24: note = Synthetic
  source 1..24: mol_type = other DNA
tttaccctacggcgggcgaactgg

SEQ ID NO: 9343 - DNA, 24 bp, synthetic construct
  misc_feature 1..24: note = Synthetic
  source 1..24: mol_type = other DNA
tcccagctccggatcaatagttat

SEQ ID NO: 9344 - DNA, 24 bp, synthetic construct
  misc_feature 1..24: note = Synthetic
  source 1..24: mol_type = other DNA
accacaagtctagccacttcactg

SEQ ID NO: 9345 - DNA, 24 bp, synthetic construct
  misc_feature 1..24: note = Synthetic
  source 1..24: mol_type = other DNA
tgctagcgcatggatgtcacagat

SEQ ID NO: 9346 - DNA, 24 bp, synthetic construct
  misc_feature 1..24: note = Synthetic
  source 1..24: mol_type = other DNA
cgcgtgaggcgtgcaggacccaac

SEQ ID NO: 9347 - DNA, 24 bp, synthetic construct
  misc_feature 1..24: note = Synthetic
  source 1..24: mol_type = other DNA
ggcaagacgagcgaatgattcctc

SEQ ID NO: 9348 - DNA, 24 bp, synthetic construct
  misc_feature 1..24: note = Synthetic
  source 1..24: mol_type = other DNA
acttcgtccagatttcctaataaa

SEQ ID NO: 9349 - DNA, 24 bp, synthetic construct
  misc_feature 1..24: note = Synthetic
  source 1..24: mol_type = other DNA
tcaaactcaccgacgtgccggttc

SEQ ID NO: 9350 - DNA, 24 bp, synthetic construct
  misc_feature 1..24: note = Synthetic
  source 1..24: mol_type = other DNA
actacgactgagactgctaattaa

SEQ ID NO: 9351 - DNA, 24 bp, synthetic construct
  misc_feature 1..24: note = Synthetic
  source 1..24: mol_type = other DNA
gcggccattgtgattagcccttta

SEQ ID NO: 9352 - DNA, 24 bp, synthetic construct
  misc_feature 1..24: note = Synthetic
  source 1..24: mol_type = other DNA
cagataaatgaagggcatggactg

SEQ ID NO: 9353 - DNA, 24 bp, synthetic construct
  misc_feature 1..24: note = Synthetic
  source 1..24: mol_type = other DNA
tgcgacaagtggcttcgcccgagg

SEQ ID NO: 9354 - DNA, 24 bp, synthetic construct
  misc_feature 1..24: note = Synthetic
  source 1..24: mol_type = other DNA
cgtatgtaggtttgggatcgctct

SEQ ID NO: 9355 - DNA, 24 bp, synthetic construct
  misc_feature 1..24: note = Synthetic
  source 1..24: mol_type = other DNA
ggtggtaacgctgtaggaatactc

SEQ ID NO: 9356 - DNA, 24 bp, synthetic construct
  misc_feature 1..24: note = Synthetic
  source 1..24: mol_type = other DNA
tcctcgcagaatcaccaattatcg

SEQ ID NO: 9357 - DNA, 24 bp, synthetic construct
  misc_feature 1..24: note = Synthetic
  source 1..24: mol_type = other DNA
ttgcggactttcctgaatcggaga

SEQ ID NO: 9358 - DNA, 24 bp, synthetic construct
  misc_feature 1..24: note = Synthetic
  source 1..24: mol_type = other DNA
agcacacatgacatgtggcgggac

SEQ ID NO: 9359 - DNA, 24 bp, synthetic construct
  misc_feature 1..24: note = Synthetic
  source 1..24: mol_type = other DNA
cgttcattcgcgcatcacagatgc

SEQ ID NO: 9360 - DNA, 24 bp, synthetic construct
  misc_feature 1..24: note = Synthetic
  source 1..24: mol_type = other DNA
ccgtcggcggcaatcggcgaagcc

SEQ ID NO: 9361 - DNA, 24 bp, synthetic construct
  misc_feature 1..24: note = Synthetic
  source 1..24: mol_type = other DNA
cccagcccggtctaggatcacgtg

SEQ ID NO: 9362 - DNA, 24 bp, synthetic construct
  misc_feature 1..24: note = Synthetic
  source 1..24: mol_type = other DNA
aactttacaggaccttcagacctc

SEQ ID NO: 9363 - DNA, 24 bp, synthetic construct
  misc_feature 1..24: note = Synthetic
  source 1..24: mol_type = other DNA
cgctgtcgtaggatgggaccttca

SEQ ID NO: 9364 - DNA, 24 bp, synthetic construct
  misc_feature 1..24: note = Synthetic
  source 1..24: mol_type = other DNA
agtaactgcgtggagcgagttagc

SEQ ID NO: 9365 - DNA, 24 bp, synthetic construct
  misc_feature 1..24: note = Synthetic
  source 1..24: mol_type = other DNA
gatctgtgatgcagcaatgatctg

SEQ ID NO: 9366 - DNA, 24 bp, synthetic construct
  misc_feature 1..24: note = Synthetic
  source 1..24: mol_type = other DNA
gaatagaatacctaaggcaatgca

SEQ ID NO: 9367 - DNA, 24 bp, synthetic construct
  misc_feature 1..24: note = Synthetic
  source 1..24: mol_type = other DNA
acgtcgccggctgtgcttatccct

SEQ ID NO: 9368 - DNA, 24 bp, synthetic construct
  misc_feature 1..24: note = Synthetic
  source 1..24: mol_type = other DNA
gataaggctactatcccaatagcc

SEQ ID NO: 9369 - DNA, 24 bp, synthetic construct
  misc_feature 1..24: note = Synthetic
  source 1..24: mol_type = other DNA
ctgcttatggacggtctgtgcggc

SEQ ID NO: 9370 - DNA, 24 bp, synthetic construct
  misc_feature 1..24: note = Synthetic
  source 1..24: mol_type = other DNA
gtttatggaacctacgaatgccag

SEQ ID NO: 9371 - DNA, 24 bp, synthetic construct
  misc_feature 1..24: note = Synthetic
  source 1..24: mol_type = other DNA
ccgttgtgcccagccggattactc

SEQ ID NO: 9372 - DNA, 24 bp, synthetic construct
  misc_feature 1..24: note = Synthetic
  source 1..24: mol_type = other DNA
cttatccatatcaatagtccagtc

SEQ ID NO: 9373 - DNA, 24 bp, synthetic construct
  misc_feature 1..24: note = Synthetic
  source 1..24: mol_type = other DNA
aacttgtgctgattacggatgtct

SEQ ID NO: 9374 - DNA, 24 bp, synthetic construct
  misc_feature 1..24: note = Synthetic
  source 1..24: mol_type = other DNA
agatcccaggacctcatcgacaat

SEQ ID NO: 9375 - DNA, 24 bp, synthetic construct
  misc_feature 1..24: note = Synthetic
  source 1..24: mol_type = other DNA
cattcttcagcgcataaagatgcc

SEQ ID NO: 9376 - DNA, 24 bp, synthetic construct
  misc_feature 1..24: note = Synthetic
  source 1..24: mol_type = other DNA
tacatcgagtcttggaggaaacta

SEQ ID NO: 9377 - DNA, 24 bp, synthetic construct
  misc_feature 1..24: note = Synthetic
  source 1..24: mol_type = other DNA
ggttctatgtagatgtgaatctac

SEQ ID NO: 9378 - DNA, 24 bp, synthetic construct
  misc_feature 1..24: note = Synthetic
  source 1..24: mol_type = other DNA
catacctgaacatagccatctaat

SEQ ID NO: 9379 - DNA, 24 bp, synthetic construct
  misc_feature 1..24: note = Synthetic
  source 1..24: mol_type = other DNA
tagaggatccttaaatctctctgg

SEQ ID NO: 9380 - DNA, 24 bp, synthetic construct
  misc_feature 1..24: note = Synthetic
  source 1..24: mol_type = other DNA
gctgcgtgttggacatgcccgttg

SEQ ID NO: 9381 - DNA, 24 bp, synthetic construct
  misc_feature 1..24: note = Synthetic
  source 1..24: mol_type = other DNA
agggaactgcaagtacacagcacc

SEQ ID NO: 9382 - DNA, 24 bp, synthetic construct
  misc_feature 1..24: note = Synthetic
  source 1..24: mol_type = other DNA
tgaaattactcggtaacttgactc

SEQ ID NO: 9383 - DNA, 24 bp, synthetic construct
  misc_feature 1..24: note = Synthetic
  source 1..24: mol_type = other DNA
aattcagaagtgctcagttagcat

SEQ ID NO: 9384 - DNA, 24 bp, synthetic construct
  misc_feature 1..24: note = Synthetic
  source 1..24: mol_type = other DNA
cgttaactgatagcgtgcactgca

SEQ ID NO: 9385 - DNA, 24 bp, synthetic construct
  misc_feature 1..24: note = Synthetic
  source 1..24: mol_type = other DNA
tgccgtgagaatgacataccaagc

SEQ ID NO: 9386 - DNA, 24 bp, synthetic construct
  misc_feature 1..24: note = Synthetic
  source 1..24: mol_type = other DNA
ctgtatcgccacgggtcaaactgg

SEQ ID NO: 9387 - DNA, 24 bp, synthetic construct
  misc_feature 1..24: note = Synthetic
  source 1..24: mol_type = other DNA
aaactaatatcggcacgctctggt

SEQ ID NO: 9388 - DNA, 24 bp, synthetic construct
  misc_feature 1..24: note = Synthetic
  source 1..24: mol_type = other DNA
gaagcctttatacgccaaagggag

SEQ ID NO: 9389 - DNA, 24 bp, synthetic construct
  misc_feature 1..24: note = Synthetic
  source 1..24: mol_type = other DNA
gcaactatttacctggtggagtaa

SEQ ID NO: 9390 - DNA, 24 bp, synthetic construct
  misc_feature 1..24: note = Synthetic
  source 1..24: mol_type = other DNA
aaatttcagcaccaaagggtcgga

SEQ ID NO: 9391 - DNA, 24 bp, synthetic construct
  misc_feature 1..24: note = Synthetic
  source 1..24: mol_type = other DNA
atacagtccttgagcaatatgcgc

SEQ ID NO: 9392 - DNA, 24 bp, synthetic construct
  misc_feature 1..24: note = Synthetic
  source 1..24: mol_type = other DNA
taaagcagtaccacaatagttacc

SEQ ID NO: 9393 - DNA, 24 bp, synthetic construct
  misc_feature 1..24: note = Synthetic
  source 1..24: mol_type = other DNA
tgcgcgccactctttctgtgcctt

SEQ ID NO: 9394 - DNA, 24 bp, synthetic construct
  misc_feature 1..24: note = Synthetic
  source 1..24: mol_type = other DNA
gagagtagagatatatcgaatatt

SEQ ID NO: 9395 - DNA, 24 bp, synthetic construct
  misc_feature 1..24: note = Synthetic
  source 1..24: mol_type = other DNA
gggccgcaagagttatcggacaca

SEQ ID NO: 9396 - DNA, 24 bp, synthetic construct
  misc_feature 1..24: note = Synthetic
  source 1..24: mol_type = other DNA
aggtaatcggtttcatcagcaaag

SEQ ID NO: 9397 - DNA, 24 bp, synthetic construct
  misc_feature 1..24: note = Synthetic
  source 1..24: mol_type = other DNA
cagctcgtgggttcttacgtggaa

SEQ ID NO: 9398 - DNA, 24 bp, synthetic construct
  misc_feature 1..24: note = Synthetic
  source 1..24: mol_type = other DNA
cggagtgccaatcgggttagagtt

SEQ ID NO: 9399 - DNA, 24 bp, synthetic construct
  misc_feature 1..24: note = Synthetic
  source 1..24: mol_type = other DNA
tacccatcggcatacagagcttat

SEQ ID NO: 9400 - DNA, 24 bp, synthetic construct
  misc_feature 1..24: note = Synthetic
  source 1..24: mol_type = other DNA
gccttaccgatttccttacacgct

SEQ ID NO: 9401 - DNA, 24 bp, synthetic construct
  misc_feature 1..24: note = Synthetic
  source 1..24: mol_type = other DNA
aataatgtttagcaccatgttgct

SEQ ID NO: 9402 - DNA, 24 bp, synthetic construct
  misc_feature 1..24: note = Synthetic
  source 1..24: mol_type = other DNA
aggtccgtagaccggagtatttca

SEQ ID NO: 9403 - DNA, 24 bp, synthetic construct
  misc_feature 1..24: note = Synthetic
  source 1..24: mol_type = other DNA
tgtttgtgcgaccagcagaaccgt

SEQ ID NO: 9404 - DNA, 24 bp, synthetic construct
  misc_feature 1..24: note = Synthetic
  source 1..24: mol_type = other DNA
tggagttcctggagccgtagccca

SEQ ID NO: 9405 - DNA, 24 bp, synthetic construct
  misc_feature 1..24: note = Synthetic
  source 1..24: mol_type = other DNA
ggcctggtagtgtagtgtgcccgg

SEQ ID NO: 9406 - DNA, 24 bp, synthetic construct
  misc_feature 1..24: note = Synthetic
  source 1..24: mol_type = other DNA
cccactaaatgcaagaattcaaga

SEQ ID NO: 9407 - DNA, 24 bp, synthetic construct
  misc_feature 1..24: note = Synthetic
  source 1..24: mol_type = other DNA
tcgatgaaccacatgacctaaacc

SEQ ID NO: 9408 - DNA, 24 bp, synthetic construct
  misc_feature 1..24: note = Synthetic
  source 1..24: mol_type = other DNA
ctaggctggagttcttgaggtact

SEQ ID NO: 9409 - DNA, 24 bp, synthetic construct
  misc_feature 1..24: note = Synthetic
  source 1..24: mol_type = other DNA
tcttattgttggatgagtgtctta

SEQ ID NO: 9410 - DNA, 24 bp, synthetic construct
  misc_feature 1..24: note = Synthetic
  source 1..24: mol_type = other DNA
cctgggagttgcgcaggtatgcat

SEQ ID NO: 9411 - DNA, 24 bp, synthetic construct
  misc_feature 1..24: note = Synthetic
  source 1..24: mol_type = other DNA
tacggacggttgtccaacctttag

SEQ ID NO: 9412 - DNA, 24 bp, synthetic construct
  misc_feature 1..24: note = Synthetic
  source 1..24: mol_type = other DNA
ctaagaaacaggatggcgcgagac

SEQ ID NO: 9413 - DNA, 24 bp, synthetic construct
  misc_feature 1..24: note = Synthetic
  source 1..24: mol_type = other DNA
ggctgattctattaagtgtctggt

SEQ ID NO: 9414 - DNA, 24 bp, synthetic construct
  misc_feature 1..24: note = Synthetic
  source 1..24: mol_type = other DNA
tttgatcgcgctcatatcaaacga

SEQ ID NO: 9415 - DNA, 24 bp, synthetic construct
  misc_feature 1..24: note = Synthetic
  source 1..24: mol_type = other DNA
tcaataggcataaagcgctgggag

SEQ ID NO: 9416 - DNA, 24 bp, synthetic construct
  misc_feature 1..24: note = Synthetic
  source 1..24: mol_type = other DNA
aggaatacgcgtgaggttgtgttt

SEQ ID NO: 9417 - DNA, 24 bp, synthetic construct
  misc_feature 1..24: note = Synthetic
  source 1..24: mol_type = other DNA
ggcatggatctcgccctaaagcta

SEQ ID NO: 9418 - DNA, 24 bp, synthetic construct
  misc_feature 1..24: note = Synthetic
  source 1..24: mol_type = other DNA
gatatagttaccaagggaagaata

SEQ ID NO: 9419 - DNA, 24 bp, synthetic construct
  misc_feature 1..24: note = Synthetic
  source 1..24: mol_type = other DNA
ggccgaggcgcagtgcagcctctc

SEQ ID NO: 9420 - DNA, 24 bp, synthetic construct
  misc_feature 1..24: note = Synthetic
  source 1..24: mol_type = other DNA
ctcgcctcacacagacaagatatg

SEQ ID NO: 9421 - DNA, 24 bp, synthetic construct
  misc_feature 1..24: note = Synthetic
  source 1..24: mol_type = other DNA
aggatacaggtgctggagacttaa

SEQ ID NO: 9422 - DNA, 24 bp, synthetic construct
  misc_feature 1..24: note = Synthetic
  source 1..24: mol_type = other DNA
agactgcggtcaggtgcgcaagtc

SEQ ID NO: 9423 - DNA, 24 bp, synthetic construct
  misc_feature 1..24: note = Synthetic
  source 1..24: mol_type = other DNA
agtaccggcttattaaccttagtc

SEQ ID NO: 9424 - DNA, 24 bp, synthetic construct
  misc_feature 1..24: note = Synthetic
  source 1..24: mol_type = other DNA
ttactgaatcgtctttgatctctt

SEQ ID NO: 9425 - DNA, 24 bp, synthetic construct
  misc_feature 1..24: note = Synthetic
  source 1..24: mol_type = other DNA
ggcggccgagcggtagggcgccgg

SEQ ID NO: 9426 - DNA, 24 bp, synthetic construct
  misc_feature 1..24: note = Synthetic
  source 1..24: mol_type = other DNA
cgaacaagcgctcctggcatagtg

SEQ ID NO: 9427 - DNA, 24 bp, synthetic construct
  misc_feature 1..24: note = Synthetic
  source 1..24: mol_type = other DNA
aactgtgggtgctgagtcaatacc

SEQ ID NO: 9428 - DNA, 24 bp, synthetic construct
  misc_feature 1..24: note = Synthetic
  source 1..24: mol_type = other DNA
acccggaatctatgaactagggtt

SEQ ID NO: 9429 - DNA, 24 bp, synthetic construct
  misc_feature 1..24: note = Synthetic
  source 1..24: mol_type = other DNA
gaacatgacaatggatataaacga

SEQ ID NO: 9430 - DNA, 24 bp, synthetic construct
  misc_feature 1..24: note = Synthetic
  source 1..24: mol_type = other DNA
atagtagtaccattggcggttgat

SEQ ID NO: 9431 - DNA, 24 bp, synthetic construct
  misc_feature 1..24: note = Synthetic
  source 1..24: mol_type = other DNA
accatttgtttggcggaaacgccg

SEQ ID NO: 9432 - DNA, 24 bp, synthetic construct
  misc_feature 1..24: note = Synthetic
  source 1..24: mol_type = other DNA
gtatcagaacttgccgctctcgtg

SEQ ID NO: 9433 - DNA, 24 bp, synthetic construct
  misc_feature 1..24: note = Synthetic
  source 1..24: mol_type = other DNA
ggtctcgggaagatcttcgaagac

SEQ ID NO: 9434 - DNA, 24 bp, synthetic construct
  misc_feature 1..24: note = Synthetic
  source 1..24: mol_type = other DNA
tcataatcctgcgcaatgaagtcg

SEQ ID NO: 9435 - DNA, 24 bp, synthetic construct
  misc_feature 1..24: note = Synthetic
  source 1..24: mol_type = other DNA
ttgttggtagatcctagtgcgata

SEQ ID NO: 9436 - DNA, 24 bp, synthetic construct
  misc_feature 1..24: note = Synthetic
  source 1..24: mol_type = other DNA
agtggtcggaggtaccgtcaagct

SEQ ID NO: 9437 - DNA, 24 bp, synthetic construct
  misc_feature 1..24: note = Synthetic
  source 1..24: mol_type = other DNA
gtgctttccaggatgggcttcgtg

SEQ ID NO: 9438 - DNA, 24 bp, synthetic construct
  misc_feature 1..24: note = Synthetic
  source 1..24: mol_type = other DNA
cctcccaaagattgcaattattac

SEQ ID NO: 9439 - DNA, 24 bp, synthetic construct
  misc_feature 1..24: note = Synthetic
  source 1..24: mol_type = other DNA
ttgtcagggatcaaccggcaacta

SEQ ID NO: 9440 - DNA, 24 bp, synthetic construct
  misc_feature 1..24: note = Synthetic
  source 1..24: mol_type = other DNA
agtggataccggccgaaatattat

SEQ ID NO: 9441 - DNA, 24 bp, synthetic construct
  misc_feature 1..24: note = Synthetic
  source 1..24: mol_type = other DNA
agcccgtaatcttaatcgcaggtg

SEQ ID NO: 9442 - DNA, 24 bp, synthetic construct
  misc_feature 1..24: note = Synthetic
  source 1..24: mol_type = other DNA
tgtacacacggtcattacgtttgg

SEQ ID NO: 9443 - DNA, 24 bp, synthetic construct
  misc_feature 1..24: note = Synthetic
  source 1..24: mol_type = other DNA
tgcatattgtcagatccatcggct

SEQ ID NO: 9444 - DNA, 24 bp, synthetic construct
  misc_feature 1..24: note = Synthetic
  source 1..24: mol_type = other DNA
tactatcacggttcggagtggtaa

SEQ ID NO: 9445 - DNA, 24 bp, synthetic construct
  misc_feature 1..24: note = Synthetic
  source 1..24: mol_type = other DNA
ctgctaaagttgggctcagctaga

SEQ ID NO: 9446 - DNA, 24 bp, synthetic construct
  misc_feature 1..24: note = Synthetic
  source 1..24: mol_type = other DNA
gtagcgatttgatccaacgccaca

SEQ ID NO: 9447 - DNA, 24 bp, synthetic construct
  misc_feature 1..24: note = Synthetic
  source 1..24: mol_type = other DNA
aaagtgctcgaccggtttggcccg

SEQ ID NO: 9448 - DNA, 24 bp, synthetic construct
  misc_feature 1..24: note = Synthetic
  source 1..24: mol_type = other DNA
tcggacggcgtggtagtatctgac

SEQ ID NO: 9449 - DNA, 24 bp, synthetic construct
  misc_feature 1..24: note = Synthetic
  source 1..24: mol_type = other DNA
aggtaggattctagatctctttat

SEQ ID NO: 9450 - DNA, 24 bp, synthetic construct
  misc_feature 1..24: note = Synthetic
  source 1..24: mol_type = other DNA
caacctcacaggatatagcatatt

SEQ ID NO: 9451 - DNA, 24 bp, synthetic construct
  misc_feature 1..24: note = Synthetic
  source 1..24: mol_type = other DNA
gaatggtgctaaggtagagcatgg

SEQ ID NO: 9452 - DNA, 24 bp, synthetic construct
  misc_feature 1..24: note = Synthetic
  source 1..24: mol_type = other DNA
tttagtttgtgcaggaaagcaaca

SEQ ID NO: 9453 - DNA, 24 bp, synthetic construct
  misc_feature 1..24: note = Synthetic
  source 1..24: mol_type = other DNA
agacgtaccaggcaaattcactac

SEQ ID NO: 9454 - DNA, 24 bp, synthetic construct
  misc_feature 1..24: note = Synthetic
  source 1..24: mol_type = other DNA
gctaatatattctccctgtgctaa

SEQ ID NO: 9455 - DNA, 24 bp, synthetic construct
  misc_feature 1..24: note = Synthetic
  source 1..24: mol_type = other DNA
ccttaatggaatctagattcgggc

SEQ ID NO: 9456 - DNA, 24 bp, synthetic construct
  misc_feature 1..24: note = Synthetic
  source 1..24: mol_type = other DNA
gatattgaatgagtcgcatatgct

SEQ ID NO: 9457 - DNA, 24 bp, synthetic construct
  misc_feature 1..24: note = Synthetic
  source 1..24: mol_type = other DNA
gtctcgtacgatagaggcatttac

SEQ ID NO: 9458 - DNA, 24 bp, synthetic construct
  misc_feature 1..24: note = Synthetic
  source 1..24: mol_type = other DNA
agccgattgatcaacgtagatgta

SEQ ID NO: 9459 - DNA, 24 bp, synthetic construct
  misc_feature 1..24: note = Synthetic
  source 1..24: mol_type = other DNA
gtgataggagaaactttactggta

SEQ ID NO: 9460 - DNA, 24 bp, synthetic construct
  misc_feature 1..24: note = Synthetic
  source 1..24: mol_type = other DNA
aatttacgctaaggctctatcttc

SEQ ID NO: 9461 - DNA, 24 bp, synthetic construct
  misc_feature 1..24: note = Synthetic
  source 1..24: mol_type = other DNA
gccttcacggaacacgtacacaag

SEQ ID NO: 9462 - DNA, 24 bp, synthetic construct
  misc_feature 1..24: note = Synthetic
  source 1..24: mol_type = other DNA
ccaagttcttgtgaaatcgtctca

SEQ ID NO: 9463 - DNA, 24 bp, synthetic construct
  misc_feature 1..24: note = Synthetic
  source 1..24: mol_type = other DNA
gttaccacttgaagggctggtgct

SEQ ID NO: 9464 - DNA, 24 bp, synthetic construct
  misc_feature 1..24: note = Synthetic
  source 1..24: mol_type = other DNA
ccggtggacgcccattccacgacg

SEQ ID NO: 9465 - DNA, 24 bp, synthetic construct
  misc_feature 1..24: note = Synthetic
  source 1..24: mol_type = other DNA
tggacgacccttcaatcgcgttcc

SEQ ID NO: 9466 - DNA, 24 bp, synthetic construct
  misc_feature 1..24: note = Synthetic
  source 1..24: mol_type = other DNA
tagggcaagctggtgatcagagat

SEQ ID NO: 9467 - DNA, 24 bp, synthetic construct
  misc_feature 1..24: note = Synthetic
  source 1..24: mol_type = other DNA
ttagccctgaaggtcaatatacca

SEQ ID NO: 9468 - DNA, 24 bp, synthetic construct
  misc_feature 1..24: note = Synthetic
  source 1..24: mol_type = other DNA
actgctcctgcttgggagtgatag

SEQ ID NO: 9469 - DNA, 24 bp, synthetic construct
  misc_feature 1..24: note = Synthetic
  source 1..24: mol_type = other DNA
gacgtgtgatcccagcatgtacct

SEQ ID NO: 9470 - DNA, 24 bp, synthetic construct
  misc_feature 1..24: note = Synthetic
  source 1..24: mol_type = other DNA
gaagaagaggtaacaagcccagtg

SEQ ID NO: 9471 - DNA, 24 bp, synthetic construct
  misc_feature 1..24: note = Synthetic
  source 1..24: mol_type = other DNA
agactcgtctagagttaagagcgg

SEQ ID NO: 9472 - DNA, 24 bp, synthetic construct
  misc_feature 1..24: note = Synthetic
  source 1..24: mol_type = other DNA
ataatggttatacccgtagatgtg

SEQ ID NO: 9473 - DNA, 24 bp, synthetic construct
  misc_feature 1..24: note = Synthetic
  source 1..24: mol_type = other DNA
cgatcgcgacaattagcctctcaa

SEQ ID NO: 9474 - DNA, 24 bp, synthetic construct
  misc_feature 1..24: note = Synthetic
  source 1..24: mol_type = other DNA
cggtctgagtcactcaagtttgct

SEQ ID NO: 9475 - DNA, 24 bp, synthetic construct
  misc_feature 1..24: note = Synthetic
  source 1..24: mol_type = other DNA
agtgtttaagcgttcaggacgctc

SEQ ID NO: 9476 - DNA, 24 bp, synthetic construct
  misc_feature 1..24: note = Synthetic
  source 1..24: mol_type = other DNA
gcggtatccaacagtatctagaat

SEQ ID NO: 9477 - DNA, 24 bp, synthetic construct
  misc_feature 1..24: note = Synthetic
  source 1..24: mol_type = other DNA
ggtcagctgggcatgtcacctaat

SEQ ID NO: 9478 - DNA, 24 bp, synthetic construct
  misc_feature 1..24: note = Synthetic
  source 1..24: mol_type = other DNA
ctgcctccagctccgttcagcacg

SEQ ID NO: 9479 - DNA, 24 bp, synthetic construct
  misc_feature 1..24: note = Synthetic
  source 1..24: mol_type = other DNA
gcggcttcaatatgtcagtcgtcc

SEQ ID NO: 9480 - DNA, 24 bp, synthetic construct
  misc_feature 1..24: note = Synthetic
  source 1..24: mol_type = other DNA
gcgtgagatatcaagaatttgtct

SEQ ID NO: 9481 - DNA, 24 bp, synthetic construct
  misc_feature 1..24: note = Synthetic
  source 1..24: mol_type = other DNA
ccggtacaatgccctcattgtgag

SEQ ID NO: 9482 - DNA, 24 bp, synthetic construct
  misc_feature 1..24: note = Synthetic
  source 1..24: mol_type = other DNA
atgatgacgctaaacggtagtatg

SEQ ID NO: 9483 - DNA, 24 bp, synthetic construct
  misc_feature 1..24: note = Synthetic
  source 1..24: mol_type = other DNA
tagtcctctggtcgaccctcgcca

SEQ ID NO: 9484 - DNA, 24 bp, synthetic construct
  misc_feature 1..24: note = Synthetic
  source 1..24: mol_type = other DNA
atttgaagcttcgtaccagaaata

SEQ ID NO: 9485 - DNA, 24 bp, synthetic construct
  misc_feature 1..24: note = Synthetic
  source 1..24: mol_type = other DNA
ggagttccgtcaatcgggatattg

SEQ ID NO: 9486 - DNA, 24 bp, synthetic construct
  misc_feature 1..24: note = Synthetic
  source 1..24: mol_type = other DNA
cccggtggtgagcgtaatcgcctg

SEQ ID NO: 9487 - DNA, 24 bp, synthetic construct
  misc_feature 1..24: note = Synthetic
  source 1..24: mol_type = other DNA
tgccctcgagagaaatactttcgt

SEQ ID NO: 9488 - DNA, 24 bp, synthetic construct
  misc_feature 1..24: note = Synthetic
  source 1..24: mol_type = other DNA
acgcgaggaaggtatcgtaggtat

SEQ ID NO: 9489 - DNA, 24 bp, synthetic construct
  misc_feature 1..24: note = Synthetic
  source 1..24: mol_type = other DNA
ttgagtaagcggagccataaagga

SEQ ID NO: 9490 - DNA, 24 bp, synthetic construct
  misc_feature 1..24: note = Synthetic
  source 1..24: mol_type = other DNA
gtgagactaaactccacccttatg

SEQ ID NO: 9491 - DNA, 24 bp, synthetic construct
  misc_feature 1..24: note = Synthetic
  source 1..24: mol_type = other DNA
aatggaataataatcggcgacgca

SEQ ID NO: 9492 - DNA, 24 bp, synthetic construct
  misc_feature 1..24: note = Synthetic
  source 1..24: mol_type = other DNA
aattctcatactatccgctgtcga

SEQ ID NO: 9493 - DNA, 24 bp, synthetic construct
  misc_feature 1..24: note = Synthetic
  source 1..24: mol_type = other DNA
gtctgcttagcgcgaaatggctgc

SEQ ID NO: 9494 - DNA, 24 bp, synthetic construct
  misc_feature 1..24: note = Synthetic
  source 1..24: mol_type = other DNA
ttcgcttgtacgggtcacgtttga

SEQ ID NO: 9495 - DNA, 24 bp, synthetic construct
  misc_feature 1..24: note = Synthetic
  source 1..24: mol_type = other DNA
cgtgacagtggccgcgccgcttac

SEQ ID NO: 9496 - DNA, 24 bp, synthetic construct
  misc_feature 1..24: note = Synthetic
  source 1..24: mol_type = other DNA
gtcgctcgcattggtaaagtgtac

SEQ ID NO: 9497 - DNA, 24 bp, synthetic construct
  misc_feature 1..24: note = Synthetic
  source 1..24: mol_type = other DNA
accaccgacatctcagttctcgtc

SEQ ID NO: 9498 - DNA, 24 bp, synthetic construct
  misc_feature 1..24: note = Synthetic
  source 1..24: mol_type = other DNA
ccaagcaacgaccaaacgactaac

SEQ ID NO: 9499 - DNA, 24 bp, synthetic construct
  misc_feature 1..24: note = Synthetic
  source 1..24: mol_type = other DNA
ctatcttacagaagaatgaccatg

SEQ ID NO: 9500 - DNA, 24 bp, synthetic construct
  misc_feature 1..24: note = Synthetic
  source 1..24: mol_type = other DNA
cacactcttcaggttactgttctg

SEQ ID NO: 9501 - DNA, 24 bp, synthetic construct
  misc_feature 1..24: note = Synthetic
  source 1..24: mol_type = other DNA
tccgatcgctgtcgacttgtatgt

SEQ ID NO: 9502 - DNA, 24 bp, synthetic construct
  misc_feature 1..24: note = Synthetic
  source 1..24: mol_type = other DNA
gtcatgaggaaactagcgtggcca

SEQ ID NO: 9503 - DNA, 24 bp, synthetic construct
  misc_feature 1..24: note = Synthetic
  source 1..24: mol_type = other DNA
ggattgccagtagaacagtaccgc

SEQ ID NO: 9504 - DNA, 24 bp, synthetic construct
  misc_feature 1..24: note = Synthetic
  source 1..24: mol_type = other DNA
gcccttgccaatcgatagaagcaa

SEQ ID NO: 9505 - DNA, 24 bp, synthetic construct
  misc_feature 1..24: note = Synthetic
  source 1..24: mol_type = other DNA
cccgccgttgtttgcccgaccatt

SEQ ID NO: 9506 - DNA, 24 bp, synthetic construct
  misc_feature 1..24: note = Synthetic
  source 1..24: mol_type = other DNA
tggtccgggactgagaagtcctgc

SEQ ID NO: 9507 - DNA, 24 bp, synthetic construct
  misc_feature 1..24: note = Synthetic
  source 1..24: mol_type = other DNA
caacttgttagataagggttatta

SEQ ID NO: 9508 - DNA, 24 bp, synthetic construct
  misc_feature 1..24: note = Synthetic
  source 1..24: mol_type = other DNA
ctcgcgatcacagggatcatactt

SEQ ID NO: 9509 - DNA, 24 bp, synthetic construct
  misc_feature 1..24: note = Synthetic
  source 1..24: mol_type = other DNA
gtcggtcgctcttcagttgttctt

SEQ ID NO: 9510 - DNA, 24 bp, synthetic construct
  misc_feature 1..24: note = Synthetic
  source 1..24: mol_type = other DNA
atacctcaagaacccttgtgaggt

SEQ ID NO: 9511 - DNA, 24 bp, synthetic construct
  misc_feature 1..24: note = Synthetic
  source 1..24: mol_type = other DNA
ggaacggtagcgaagcaactcaag

SEQ ID NO: 9512 - DNA, 24 bp, synthetic construct
  misc_feature 1..24: note = Synthetic
  source 1..24: mol_type = other DNA
ctatggagccatgtaaggcaagtt

SEQ ID NO: 9513 - DNA, 24 bp, synthetic construct
  misc_feature 1..24: note = Synthetic
  source 1..24: mol_type = other DNA
ctcgcttgtagtacaatcacgccg

SEQ ID NO: 9514 - DNA, 24 bp, synthetic construct
  misc_feature 1..24: note = Synthetic
  source 1..24: mol_type = other DNA
aacttatttatactagcagaggtc

SEQ ID NO: 9515 - DNA, 24 bp, synthetic construct
  misc_feature 1..24: note = Synthetic
  source 1..24: mol_type = other DNA
cgtcgaaaccgttcaacggaagga

SEQ ID NO: 9516 - DNA, 24 bp, synthetic construct
  misc_feature 1..24: note = Synthetic
  source 1..24: mol_type = other DNA
acagtccacattattccattaagg

SEQ ID NO: 9517 - DNA, 24 bp, synthetic construct
  misc_feature 1..24: note = Synthetic
  source 1..24: mol_type = other DNA
ggcgcgcccatcttctcgctaccg

SEQ ID NO: 9518 - DNA, 24 bp, synthetic construct
  misc_feature 1..24: note = Synthetic
  source 1..24: mol_type = other DNA
tgagatcgatcgttatcggaccac

SEQ ID NO: 9519 - DNA, 24 bp, synthetic construct
  misc_feature 1..24: note = Synthetic
  source 1..24: mol_type = other DNA
agaagacctcatcgtgttgtgccc

SEQ ID NO: 9520 - DNA, 24 bp, synthetic construct
  misc_feature 1..24: note = Synthetic
  source 1..24: mol_type = other DNA
cctattgcgatctttatagaatct

SEQ ID NO: 9521 - DNA, 24 bp, synthetic construct
  misc_feature 1..24: note = Synthetic
  source 1..24: mol_type = other DNA
caatcgtcgccgtccagtgcataa

SEQ ID NO: 9522 - DNA, 24 bp, synthetic construct
  misc_feature 1..24: note = Synthetic
  source 1..24: mol_type = other DNA
tgttgcatgtcataatcgcccaag

SEQ ID NO: 9523 - DNA, 24 bp, synthetic construct
  misc_feature 1..24: note = Synthetic
  source 1..24: mol_type = other DNA
acctttcgaatatgttcgatgaga

SEQ ID NO: 9524 - DNA, 24 bp, synthetic construct
  misc_feature 1..24: note = Synthetic
  source 1..24: mol_type = other DNA
actatggctcgacgtggagccgtc

SEQ ID NO: 9525 - DNA, 24 bp, synthetic construct
  misc_feature 1..24: note = Synthetic
  source 1..24: mol_type = other DNA
ccagaccttcatatattacaagat

SEQ ID NO: 9526 - DNA, 24 bp, synthetic construct
  misc_feature 1..24: note = Synthetic
  source 1..24: mol_type = other DNA
ggttactagcggaccggtaaatat

SEQ ID NO: 9527 - DNA, 24 bp, synthetic construct
  misc_feature 1..24: note = Synthetic
  source 1..24: mol_type = other DNA
gatcttggttcgtccgcactaccg

SEQ ID NO: 9528 - DNA, 24 bp, synthetic construct
  misc_feature 1..24: note = Synthetic
  source 1..24: mol_type = other DNA
ctcaggttcgaagagttacgtatc

SEQ ID NO: 9529 - DNA, 24 bp, synthetic construct
  misc_feature 1..24: note = Synthetic
  source 1..24: mol_type = other DNA
cgtgagcttgaccttacgaggtct

SEQ ID NO: 9530 - DNA, 24 bp, synthetic construct
  misc_feature 1..24: note = Synthetic
  source 1..24: mol_type = other DNA
cgttgccacaatactatatccttg

SEQ ID NO: 9531 - DNA, 24 bp, synthetic construct
  misc_feature 1..24: note = Synthetic
  source 1..24: mol_type = other DNA
ttcgcgcggacacctggacaggtg

SEQ ID NO: 9532 - DNA, 24 bp, synthetic construct
  misc_feature 1..24: note = Synthetic
  source 1..24: mol_type = other DNA
tcaatagtgtgaggtaatcaagga

SEQ ID NO: 9533 - DNA, 24 bp, synthetic construct
  misc_feature 1..24: note = Synthetic
  source 1..24: mol_type = other DNA
attagatagacgtattaaccttcc

SEQ ID NO: 9534 - DNA, 24 bp, synthetic construct
  misc_feature 1..24: note = Synthetic
  source 1..24: mol_type = other DNA
cctacgagatttgcttatagattt

SEQ ID NO: 9535 - DNA, 24 bp, synthetic construct
  misc_feature 1..24: note = Synthetic
  source 1..24: mol_type = other DNA
catgaaaggcagtgtaatctaagg

SEQ ID NO: 9536 - DNA, 24 bp, synthetic construct
  misc_feature 1..24: note = Synthetic
  source 1..24: mol_type = other DNA
cccacccgcatttgttactctcag

SEQ ID NO: 9537 - DNA, 24 bp, synthetic construct
  misc_feature 1..24: note = Synthetic
  source 1..24: mol_type = other DNA
gtcatttcattagtcccgttagag

SEQ ID NO: 9538 - DNA, 24 bp, synthetic construct
  misc_feature 1..24: note = Synthetic
  source 1..24: mol_type = other DNA
tgaactaaccaatccagaatcaag

SEQ ID NO: 9539 - DNA, 24 bp, synthetic construct
  misc_feature 1..24: note = Synthetic
  source 1..24: mol_type = other DNA
aaacactatcccaacagacactgc

SEQ ID NO: 9540 - DNA, 24 bp, synthetic construct
  misc_feature 1..24: note = Synthetic
  source 1..24: mol_type = other DNA
accgagccaagcccggctgacgag

SEQ ID NO: 9541 - DNA, 24 bp, synthetic construct
  misc_feature 1..24: note = Synthetic
  source 1..24: mol_type = other DNA
agtctttgaatgagggcggtccgt

SEQ ID NO: 9542 - DNA, 24 bp, synthetic construct
  misc_feature 1..24: note = Synthetic
  source 1..24: mol_type = other DNA
agtattagtgctgcctacggctcg

SEQ ID NO: 9543 - DNA, 24 bp, synthetic construct
  misc_feature 1..24: note = Synthetic
  source 1..24: mol_type = other DNA
tatctctttcgtgcttcctcaacc

SEQ ID NO: 9544 - DNA, 24 bp, synthetic construct
  misc_feature 1..24: note = Synthetic
  source 1..24: mol_type = other DNA
ctaccacattatgctgcggagatg

SEQ ID NO: 9545 - DNA, 24 bp, synthetic construct
  misc_feature 1..24: note = Synthetic
  source 1..24: mol_type = other DNA
gtagtgttgcgactcggtatcctt

SEQ ID NO: 9546 - DNA, 24 bp, synthetic construct
  misc_feature 1..24: note = Synthetic
  source 1..24: mol_type = other DNA
ggcgatccgttatacaagcaccac

SEQ ID NO: 9547 - DNA, 24 bp, synthetic construct
  misc_feature 1..24: note = Synthetic
  source 1..24: mol_type = other DNA
acccgtgaatgttctgcctgactt

SEQ ID NO: 9548 - DNA, 24 bp, synthetic construct
  misc_feature 1..24: note = Synthetic
  source 1..24: mol_type = other DNA
gatcgaacacagacgtccacgctt

SEQ ID NO: 9549 - DNA, 24 bp, synthetic construct
  misc_feature 1..24: note = Synthetic
  source 1..24: mol_type = other DNA
attcagatagaatgttactttgtc

SEQ ID NO: 9550 - DNA, 24 bp, synthetic construct
  misc_feature 1..24: note = Synthetic
  source 1..24: mol_type = other DNA
ttcgggattgagtcgggtaacctg

SEQ ID NO: 9551 - DNA, 24 bp, synthetic construct
  misc_feature 1..24: note = Synthetic
  source 1..24: mol_type = other DNA
gaacggcagtccagtttccctttc

SEQ ID NO: 9552 - DNA, 24 bp, synthetic construct
  misc_feature 1..24: note = Synthetic
  source 1..24: mol_type = other DNA
tttccgatactggcagcgggaaca

SEQ ID NO: 9553 - DNA, 24 bp, synthetic construct
  misc_feature 1..24: note = Synthetic
  source 1..24: mol_type = other DNA
caacgactgctggttggctcagac

SEQ ID NO: 9554 - DNA, 24 bp, synthetic construct
  misc_feature 1..24: note = Synthetic
  source 1..24: mol_type = other DNA
tttagttcatcgactgctgttaat

SEQ ID NO: 9555 - DNA, 24 bp, synthetic construct
  misc_feature 1..24: note = Synthetic
  source 1..24: mol_type = other DNA
gctctagggattccgaccgcgaag

SEQ ID NO: 9556 - DNA, 24 bp, synthetic construct
  misc_feature 1..24: note = Synthetic
  source 1..24: mol_type = other DNA
cattgtcgcaatccgttctggtcg

SEQ ID NO: 9557 - DNA, 24 bp, synthetic construct
  misc_feature 1..24: note = Synthetic
  source 1..24: mol_type = other DNA
ccctaccaagcatctagttaacga

SEQ ID NO: 9558 - DNA, 24 bp, synthetic construct
  misc_feature 1..24: note = Synthetic
  source 1..24: mol_type = other DNA
tgcgtgacatcacgggatgattag

SEQ ID NO: 9559 - DNA, 24 bp, synthetic construct
  misc_feature 1..24: note = Synthetic
  source 1..24: mol_type = other DNA
cgcgacgaaaggcaacgcgtaaat

SEQ ID NO: 9560 - DNA, 24 bp, synthetic construct
  misc_feature 1..24: note = Synthetic
  source 1..24: mol_type = other DNA
accggaaatgcctaacagaactct

SEQ ID NO: 9561 - DNA, 24 bp, synthetic construct
  misc_feature 1..24: note = Synthetic
  source 1..24: mol_type = other DNA
ttgtcgtgaaagtagactactttg

SEQ ID NO: 9562 - DNA, 24 bp, synthetic construct
  misc_feature 1..24: note = Synthetic
  source 1..24: mol_type = other DNA
gcgcggctgacggtacacggtagg

SEQ ID NO: 9563 - DNA, 24 bp, synthetic construct
  misc_feature 1..24: note = Synthetic
  source 1..24: mol_type = other DNA
aggctttcgtagtagttctgaatt

SEQ ID NO: 9564 - DNA, 24 bp, synthetic construct
  misc_feature 1..24: note = Synthetic
  source 1..24: mol_type = other DNA
ttgcatctttcgggaatcaagtaa

SEQ ID NO: 9565 - DNA, 24 bp, synthetic construct
  misc_feature 1..24: note = Synthetic
  source 1..24: mol_type = other DNA
cacgctgccggcatcatagaagct

SEQ ID NO: 9566 - DNA, 24 bp, synthetic construct
  misc_feature 1..24: note = Synthetic
  source 1..24: mol_type = other DNA
ttagactgactgtttggagctgtc

SEQ ID NO: 9567 - DNA, 24 bp, synthetic construct
  misc_feature 1..24: note = Synthetic
  source 1..24: mol_type = other DNA
gtcccgggagtaaatgtttaagta

SEQ ID NO: 9568 - DNA, 24 bp, synthetic construct
  misc_feature 1..24: note = Synthetic
  source 1..24: mol_type = other DNA
ccgatctccacggcgttgattacc

SEQ ID NO: 9569 - DNA, 24 bp, synthetic construct
  misc_feature 1..24: note = Synthetic
  source 1..24: mol_type = other DNA
tagaccttcccgtccgtagcgagc

SEQ ID NO: 9570 - DNA, 24 bp, synthetic construct
  misc_feature 1..24: note = Synthetic
  source 1..24: mol_type = other DNA
gaagacggagcttagggttgggcg

SEQ ID NO: 9571 - DNA, 24 bp, synthetic construct
  misc_feature 1..24: note = Synthetic
  source 1..24: mol_type = other DNA
aaccaagtatcaacctactttccc

SEQ ID NO: 9572 - DNA, 24 bp, synthetic construct
  misc_feature 1..24: note = Synthetic
  source 1..24: mol_type = other DNA
tgattgagtggacgggaaggattt

SEQ ID NO: 9573 - DNA, 24 bp, synthetic construct
  misc_feature 1..24: note = Synthetic
  source 1..24: mol_type = other DNA
tcggatgcggagggcgcatgtaat

SEQ ID NO: 9574 - DNA, 24 bp, synthetic construct
  misc_feature 1..24: note = Synthetic
  source 1..24: mol_type = other DNA
acgatgtcgcaattccactcgcga

SEQ ID NO: 9575 - DNA, 24 bp, synthetic construct
  misc_feature 1..24: note = Synthetic
  source 1..24: mol_type = other DNA
cgcgttcccgtgaaggaaagagga

SEQ ID NO: 9576 - DNA, 24 bp, synthetic construct
  misc_feature 1..24: note = Synthetic
  source 1..24: mol_type = other DNA
ctttctgttaccaccaaacaaacg

SEQ ID NO: 9577 - DNA, 24 bp, synthetic construct
  misc_feature 1..24: note = Synthetic
  source 1..24: mol_type = other DNA
atacaggatagatgaagcacttct

SEQ ID NO: 9578 - DNA, 24 bp, synthetic construct
  misc_feature 1..24: note = Synthetic
  source 1..24: mol_type = other DNA
ggattgctagctcgctatgccggg

SEQ ID NO: 9579 - DNA, 24 bp, synthetic construct
  misc_feature 1..24: note = Synthetic
  source 1..24: mol_type = other DNA
cgcttgaagttcttcgtgctctcc

SEQ ID NO: 9580 - DNA, 24 bp, synthetic construct
  misc_feature 1..24: note = Synthetic
  source 1..24: mol_type = other DNA
agacaatgtcgttcgcggtatgag

SEQ ID NO: 9581 - DNA, 24 bp, synthetic construct
  misc_feature 1..24: note = Synthetic
  source 1..24: mol_type = other DNA
acaggcatctggaaagcggctctg

SEQ ID NO: 9582 - DNA, 24 bp, synthetic construct
  misc_feature 1..24: note = Synthetic
  source 1..24: mol_type = other DNA
ttggctggagaatgtctgaaatca

SEQ ID NO: 9583 - DNA, 24 bp, synthetic construct
  misc_feature 1..24: note = Synthetic
  source 1..24: mol_type = other DNA
tagttctaccctatgctcgatgat

SEQ ID NO: 9584 - DNA, 24 bp, synthetic construct
  misc_feature 1..24: note = Synthetic
  source 1..24: mol_type = other DNA
tggacgtggtacgcgccgcatagt

SEQ ID NO: 9585 - DNA, 24 bp, synthetic construct
  misc_feature 1..24: note = Synthetic
  source 1..24: mol_type = other DNA
gaaaccacaatgtgcgggagtccc

SEQ ID NO: 9586 - DNA, 24 bp, synthetic construct
  misc_feature 1..24: note = Synthetic
  source 1..24: mol_type = other DNA
gagttgtaagcccgagaagttgct

SEQ ID NO: 9587 - DNA, 24 bp, synthetic construct
  misc_feature 1..24: note = Synthetic
  source 1..24: mol_type = other DNA
ctagtgctagtgtataccgtgctc

SEQ ID NO: 9588 - DNA, 24 bp, synthetic construct
  misc_feature 1..24: note = Synthetic
  source 1..24: mol_type = other DNA
tgtcccgtatggccactgcaagta

SEQ ID NO: 9589 - DNA, 24 bp, synthetic construct
  misc_feature 1..24: note = Synthetic
  source 1..24: mol_type = other DNA
gagacaaggcgggttctatctggc

SEQ ID NO: 9590 - DNA, 24 bp, synthetic construct
  misc_feature 1..24: note = Synthetic
  source 1..24: mol_type = other DNA
gtggagctatatcatctgataagt

SEQ ID NO: 9591 - DNA, 24 bp, synthetic construct
  misc_feature 1..24: note = Synthetic
  source 1..24: mol_type = other DNA
cattagcaatacctcgttagtacg

SEQ ID NO: 9592 - DNA, 24 bp, synthetic construct
  misc_feature 1..24: note = Synthetic
  source 1..24: mol_type = other DNA
gatgtgtgaaagatgctatcgagg

SEQ ID NO: 9593 - DNA, 24 bp, synthetic construct
  misc_feature 1..24: note = Synthetic
  source 1..24: mol_type = other DNA
cctccttagtgtcttgagtatatg

SEQ ID NO: 9594 - DNA, 24 bp, synthetic construct
  misc_feature 1..24: note = Synthetic
  source 1..24: mol_type = other DNA
aacgcgaggagcgcagtaaagagt

SEQ ID NO: 9595 - DNA, 24 bp, synthetic construct
  misc_feature 1..24: note = Synthetic
  source 1..24: mol_type = other DNA
tatctaattactcatcccattaaa

SEQ ID NO: 9596 - DNA, 24 bp, synthetic construct
  misc_feature 1..24: note = Synthetic
  source 1..24: mol_type = other DNA
tggtgcatggtatgcaggtacacc

SEQ ID NO: 9597 - DNA, 24 bp, synthetic construct
  misc_feature 1..24: note = Synthetic
  source 1..24: mol_type = other DNA
cgcctttagcactcctctccgcct

SEQ ID NO: 9598 - DNA, 24 bp, synthetic construct
  misc_feature 1..24: note = Synthetic
  source 1..24: mol_type = other DNA
gtgtaatgcagatctaatttagtg

SEQ ID NO: 9599 - DNA, 24 bp, synthetic construct
  misc_feature 1..24: note = Synthetic
  source 1..24: mol_type = other DNA
atgagtcctagtctgtgcatacag

SEQ ID NO: 9600 - DNA, 24 bp, synthetic construct
  misc_feature 1..24: note = Synthetic
  source 1..24: mol_type = other DNA
cggactttaagtgtagccgttcgc

SEQ ID NO: 9601 - DNA, 24 bp, synthetic construct
  misc_feature 1..24: note = Synthetic
  source 1..24: mol_type = other DNA
gtggctttagaagtgacacgcaca

SEQ ID NO: 9602 - DNA, 24 bp, synthetic construct
  misc_feature 1..24: note = Synthetic
  source 1..24: mol_type = other DNA
attgtagactatgagctggcgtgg

SEQ ID NO: 9603 - DNA, 24 bp, synthetic construct
  misc_feature 1..24: note = Synthetic
  source 1..24: mol_type = other DNA
gcgatcatctttcgttgacccggt

SEQ ID NO: 9604 - DNA, 24 bp, synthetic construct
  misc_feature 1..24: note = Synthetic
  source 1..24: mol_type = other DNA
cttggccaaaccctaccgacgcat

SEQ ID NO: 9605 - DNA, 24 bp, synthetic construct
  misc_feature 1..24: note = Synthetic
  source 1..24: mol_type = other DNA
cactggatccgtataccggcgtgg

SEQ ID NO: 9606 - DNA, 24 bp, synthetic construct
  misc_feature 1..24: note = Synthetic
  source 1..24: mol_type = other DNA
gctagtcccacgtgcaggtgtcag

SEQ ID NO: 9607 - DNA, 24 bp, synthetic construct
  misc_feature 1..24: note = Synthetic
  source 1..24: mol_type = other DNA
ctagacttgtagtggaatcccttg

SEQ ID NO: 9608 - DNA, 24 bp, synthetic construct
  misc_feature 1..24: note = Synthetic
  source 1..24: mol_type = other DNA
agtgatgtcgtcactcttgtatga

SEQ ID NO: 9609 - DNA, 24 bp, synthetic construct
  misc_feature 1..24: note = Synthetic
  source 1..24: mol_type = other DNA
tggtagagggccgagagcgtgtcg

SEQ ID NO: 9610 - DNA, 24 bp, synthetic construct
  misc_feature 1..24: note = Synthetic
  source 1..24: mol_type = other DNA
cgctaagccaagattggattcaag

SEQ ID NO: 9611 - DNA, 24 bp, synthetic construct
  misc_feature 1..24: note = Synthetic
  source 1..24: mol_type = other DNA
accgtgctatgactgccgcattat

SEQ ID NO: 9612 - DNA, 24 bp, synthetic construct
  misc_feature 1..24: note = Synthetic
  source 1..24: mol_type = other DNA
taatggaaattagataaccctaag

SEQ ID NO: 9613 - DNA, 24 bp, synthetic construct
  misc_feature 1..24: note = Synthetic
  source 1..24: mol_type = other DNA
ccgcacagagtagacttcctaccg

SEQ ID NO: 9614 - DNA, 24 bp, synthetic construct
  misc_feature 1..24: note = Synthetic
  source 1..24: mol_type = other DNA
gctcaactgagctggttatagtat

SEQ ID NO: 9615 - DNA, 24 bp, synthetic construct
  misc_feature 1..24: note = Synthetic
  source 1..24: mol_type = other DNA
tgcacgcaacttggctataatgct

SEQ ID NO: 9616 - DNA, 24 bp, synthetic construct
  misc_feature 1..24: note = Synthetic
  source 1..24: mol_type = other DNA
gaacttgtgccgccgaacaggcta

SEQ ID NO: 9617 - DNA, 24 bp, synthetic construct
  misc_feature 1..24: note = Synthetic
  source 1..24: mol_type = other DNA
gggcgagggcccagcccgatgcaa

SEQ ID NO: 9618 - DNA, 24 bp, synthetic construct
  misc_feature 1..24: note = Synthetic
  source 1..24: mol_type = other DNA
gccatgtggttgaagcagtctatt

SEQ ID NO: 9619 - DNA, 24 bp, synthetic construct
  misc_feature 1..24: note = Synthetic
  source 1..24: mol_type = other DNA
tcgataagcagaatccgccgaatc

SEQ ID NO: 9620 - DNA, 24 bp, synthetic construct
  misc_feature 1..24: note = Synthetic
  source 1..24: mol_type = other DNA
cgaccaaagggccacgtccggccc

SEQ ID NO: 9621 - DNA, 24 bp, synthetic construct
  misc_feature 1..24: note = Synthetic
  source 1..24: mol_type = other DNA
gatgtcttcaaagatcttgacacg

SEQ ID NO: 9622 - DNA, 24 bp, synthetic construct
  misc_feature 1..24: note = Synthetic
  source 1..24: mol_type = other DNA
ccgccggaatacgggagggtctaa

SEQ ID NO: 9623 - DNA, 24 bp, synthetic construct
  misc_feature 1..24: note = Synthetic
  source 1..24: mol_type = other DNA
ggagatagaagctagggcgtttat

SEQ ID NO: 9624 - DNA, 24 bp, synthetic construct
  misc_feature 1..24: note = Synthetic
  source 1..24: mol_type = other DNA
aatttgttattggacccgacgctt

SEQ ID NO: 9625 - DNA, 24 bp, synthetic construct
  misc_feature 1..24: note = Synthetic
  source 1..24: mol_type = other DNA
tcaagatgcagttacatcctatgc

SEQ ID NO: 9626 - DNA, 24 bp, synthetic construct
  misc_feature 1..24: note = Synthetic
  source 1..24: mol_type = other DNA
caaacaataaggccaataaaccga

SEQ ID NO: 9627 - DNA, 24 bp, synthetic construct
  misc_feature 1..24: note = Synthetic
  source 1..24: mol_type = other DNA
tcgtcagattcaaagggcccggta

SEQ ID NO: 9628 - DNA, 24 bp, synthetic construct
  misc_feature 1..24: note = Synthetic
  source 1..24: mol_type = other DNA
ttcgtacctatttgctataaagcg

SEQ ID NO: 9629 - DNA, 24 bp, synthetic construct
  misc_feature 1..24: note = Synthetic
  source 1..24: mol_type = other DNA
aatggatacctcaacctcttacta

SEQ ID NO: 9630 - DNA, 24 bp, synthetic construct
  misc_feature 1..24: note = Synthetic
  source 1..24: mol_type = other DNA
gacgctcatgccgtctctctgcga

SEQ ID NO: 9631 - DNA, 24 bp, synthetic construct
  misc_feature 1..24: note = Synthetic
  source 1..24: mol_type = other DNA
ctccctcgagctagcttggatcag

SEQ ID NO: 9632 - DNA, 24 bp, synthetic construct
  misc_feature 1..24: note = Synthetic
  source 1..24: mol_type = other DNA
taagtaatgttacggttagttcca

SEQ ID NO: 9633 - DNA, 24 bp, synthetic construct
  misc_feature 1..24: note = Synthetic
  source 1..24: mol_type = other DNA
tcggatatgtctttgtgccatcta

SEQ ID NO: 9634 - DNA, 24 bp, synthetic construct
  misc_feature 1..24: note = Synthetic
  source 1..24: mol_type = other DNA
tggtggaggctgactattaactgt

SEQ ID NO: 9635 - DNA, 24 bp, synthetic construct
  misc_feature 1..24: note = Synthetic
  source 1..24: mol_type = other DNA
aagtttgtttcatccttgtgtcag

SEQ ID NO: 9636 - DNA, 24 bp, synthetic construct
  misc_feature 1..24: note = Synthetic
  source 1..24: mol_type = other DNA
gttactagttgtgggtatctctgg

SEQ ID NO: 9637 - DNA, 24 bp, synthetic construct
  misc_feature 1..24: note = Synthetic
  source 1..24: mol_type = other DNA
cgtcacaagtgggcgcatattggc

SEQ ID NO: 9638 - DNA, 24 bp, synthetic construct
  misc_feature 1..24: note = Synthetic
  source 1..24: mol_type = other DNA
attattcactattacggaacaagc

SEQ ID NO: 9639 - DNA, 24 bp, synthetic construct
  misc_feature 1..24: note = Synthetic
  source 1..24: mol_type = other DNA
cgcaattcgaccgtagactaagta

SEQ ID NO: 9640 - DNA, 24 bp, synthetic construct
  misc_feature 1..24: note = Synthetic
  source 1..24: mol_type = other DNA
aaagtgaacctttccgaatggata

SEQ ID NO: 9641 - DNA, 24 bp, synthetic construct
  misc_feature 1..24: note = Synthetic
  source 1..24: mol_type = other DNA
tgtccgggcaagaatacgagttga

SEQ ID NO: 9642 - DNA, 24 bp, synthetic construct
  misc_feature 1..24: note = Synthetic
  source 1..24: mol_type = other DNA
agcctcctcatcttacggtactcc

SEQ ID NO: 9643 - DNA, 24 bp, synthetic construct
  misc_feature 1..24: note = Synthetic
  source 1..24: mol_type = other DNA
aagggtctctactatgctgataat

SEQ ID NO: 9644 - DNA, 24 bp, synthetic construct
  misc_feature 1..24: note = Synthetic
  source 1..24: mol_type = other DNA
acgttgtggcaacagcccgaaccc

SEQ ID NO: 9645 - DNA, 24 bp, synthetic construct
  misc_feature 1..24: note = Synthetic
  source 1..24: mol_type = other DNA
accggtaacactcgagggcccgta

SEQ ID NO: 9646 - DNA, 24 bp, synthetic construct
  misc_feature 1..24: note = Synthetic
  source 1..24: mol_type = other DNA
gacgctaccggaaaccacagacgg

SEQ ID NO: 9647 - DNA, 24 bp, synthetic construct
  misc_feature 1..24: note = Synthetic
  source 1..24: mol_type = other DNA
acggcgactattgaacaatttagc

SEQ ID NO: 9648 - DNA, 24 bp, synthetic construct
  misc_feature 1..24: note = Synthetic
  source 1..24: mol_type = other DNA
tggctaattcggattagtcagccc

SEQ ID NO: 9649 - DNA, 24 bp, synthetic construct
  misc_feature 1..24: note = Synthetic
  source 1..24: mol_type = other DNA
cgcaacgggtgtcagtcacaccca

SEQ ID NO: 9650 - DNA, 24 bp, synthetic construct
  misc_feature 1..24: note = Synthetic
  source 1..24: mol_type = other DNA
acaagttgtctcggccgtagcgaa

SEQ ID NO: 9651 - DNA, 24 bp, synthetic construct
  misc_feature 1..24: note = Synthetic
  source 1..24: mol_type = other DNA
gaaagaagggcgcgttaagcgttc

SEQ ID NO: 9652 - DNA, 24 bp, synthetic construct
  misc_feature 1..24: note = Synthetic
  source 1..24: mol_type = other DNA
tgtgccgctttacgtaatgaatag

SEQ ID NO: 9653 - DNA, 24 bp, synthetic construct
  misc_feature 1..24: note = Synthetic
  source 1..24: mol_type = other DNA
ccactctctttctgtcccatgcca

SEQ ID NO: 9654 - DNA, 24 bp, synthetic construct
  misc_feature 1..24: note = Synthetic
  source 1..24: mol_type = other DNA
ttggcaaatagtggttctagggcc

SEQ ID NO: 9655 - DNA, 24 bp, synthetic construct
  misc_feature 1..24: note = Synthetic
  source 1..24: mol_type = other DNA
cgttgtctggagatgtgtgtctga

SEQ ID NO: 9656 - DNA, 24 bp, synthetic construct
  misc_feature 1..24: note = Synthetic
  source 1..24: mol_type = other DNA
ggattgaccaagttacttataatc

SEQ ID NO: 9657 - DNA, 24 bp, synthetic construct
  misc_feature 1..24: note = Synthetic
  source 1..24: mol_type = other DNA
atttgtctggatgatggtatccca

SEQ ID NO: 9658 - DNA, 24 bp, synthetic construct
  misc_feature 1..24: note = Synthetic
  source 1..24: mol_type = other DNA
atattggagccctagctgcctcgg

SEQ ID NO: 9659 - DNA, 24 bp, synthetic construct
  misc_feature 1..24: note = Synthetic
  source 1..24: mol_type = other DNA
ggataatcgatcgaatgacggacc

SEQ ID NO: 9660 - DNA, 24 bp, synthetic construct
  misc_feature 1..24: note = Synthetic
  source 1..24: mol_type = other DNA
catacataacacgtcaatatacgc

SEQ ID NO: 9661 - DNA, 24 bp, synthetic construct
  misc_feature 1..24: note = Synthetic
  source 1..24: mol_type = other DNA
tttagctgataggatattgtcgaa

SEQ ID NO: 9662 - DNA, 24 bp, synthetic construct
  misc_feature 1..24: note = Synthetic
  source 1..24: mol_type = other DNA
cgaatttcagtcgacacattcctg

SEQ ID NO: 9663 - DNA, 24 bp, synthetic construct
  misc_feature 1..24: note = Synthetic
  source 1..24: mol_type = other DNA
catccgaggtacggttgcagccgc

SEQ ID NO: 9664 - DNA, 24 bp, synthetic construct
  misc_feature 1..24: note = Synthetic
  source 1..24: mol_type = other DNA
ctgttggacctccggtattacctt

SEQ ID NO: 9665 - DNA, 24 bp, synthetic construct
  misc_feature 1..24: note = Synthetic
  source 1..24: mol_type = other DNA
cgagcattggactctgataatgaa

SEQ ID NO: 9666 - DNA, 24 bp, synthetic construct
  misc_feature 1..24: note = Synthetic
  source 1..24: mol_type = other DNA
gggtgcctgcttccttgcaaccta

SEQ ID NO: 9667 - DNA, 24 bp, synthetic construct
  misc_feature 1..24: note = Synthetic
  source 1..24: mol_type = other DNA
agcccacgtagtgtgcgtggccca

SEQ ID NO: 9668 - DNA, 24 bp, synthetic construct
  misc_feature 1..24: note = Synthetic
  source 1..24: mol_type = other DNA
gaggtcccggctcaaagaaggagg

SEQ ID NO: 9669 - DNA, 24 bp, synthetic construct
  misc_feature 1..24: note = Synthetic
  source 1..24: mol_type = other DNA
tccgacagaaggccctaggcgcat

SEQ ID NO: 9670 - DNA, 24 bp, synthetic construct
  misc_feature 1..24: note = Synthetic
  source 1..24: mol_type = other DNA
cattgtgtgttgattcgaatacgt

SEQ ID NO: 9671 - DNA, 24 bp, synthetic construct
  misc_feature 1..24: note = Synthetic
  source 1..24: mol_type = other DNA
cgcacactataatcagtctgaagg

SEQ ID NO: 9672 - DNA, 24 bp, synthetic construct
  misc_feature 1..24: note = Synthetic
  source 1..24: mol_type = other DNA
gtcggcccaggcggcagtccttaa

SEQ ID NO: 9673 - DNA, 24 bp, synthetic construct
  misc_feature 1..24: note = Synthetic
  source 1..24: mol_type = other DNA
taacgcccgtctagcgatgccggt

SEQ ID NO: 9674 - DNA, 24 bp, synthetic construct
  misc_feature 1..24: note = Synthetic
  source 1..24: mol_type = other DNA
tataatatctaacggtgggtttac

SEQ ID NO: 9675 - DNA, 24 bp, synthetic construct
  misc_feature 1..24: note = Synthetic
  source 1..24: mol_type = other DNA
taatgcatcaataaggacatccca

SEQ ID NO: 9676 - DNA, 24 bp, synthetic construct
  misc_feature 1..24: note = Synthetic
  source 1..24: mol_type = other DNA
ggactatagatcgcgataactaca

SEQ ID NO: 9677 - DNA, 24 bp, synthetic construct
  misc_feature 1..24: note = Synthetic
  source 1..24: mol_type = other DNA
tggcgggtaaacaagctattagag

SEQ ID NO: 9678 - DNA, 24 bp, synthetic construct
  misc_feature 1..24: note = Synthetic
  source 1..24: mol_type = other DNA
gaatgagtagacagtcctataaga

SEQ ID NO: 9679 - DNA, 24 bp, synthetic construct
  misc_feature 1..24: note = Synthetic
  source 1..24: mol_type = other DNA
cttatatcctaggctccgaccgct

SEQ ID NO: 9680 - DNA, 24 bp, synthetic construct
  misc_feature 1..24: note = Synthetic
  source 1..24: mol_type = other DNA
tcctatctgatccgaacgcactaa

SEQ ID NO: 9681 - DNA, 24 bp, synthetic construct
  misc_feature 1..24: note = Synthetic
  source 1..24: mol_type = other DNA
cacattatttgctactaacatgaa

SEQ ID NO: 9682 - DNA, 24 bp, synthetic construct
  misc_feature 1..24: note = Synthetic
  source 1..24: mol_type = other DNA
ccttgggcggcgcacgacggtcac

SEQ ID NO: 9683 - DNA, 24 bp, synthetic construct
  misc_feature 1..24: note = Synthetic
  source 1..24: mol_type = other DNA
tgggtcgctccttaactccagatc

SEQ ID NO: 9684 - DNA, 24 bp, synthetic construct
  misc_feature 1..24: note = Synthetic
  source 1..24: mol_type = other DNA
aaacgcgttgatgccaggcggaca

SEQ ID NO: 9685 - DNA, 24 bp, synthetic construct
  misc_feature 1..24: note = Synthetic
  source 1..24: mol_type = other DNA
aataaacatgtttaactcttcggc

SEQ ID NO: 9686 - DNA, 24 bp, synthetic construct
  misc_feature 1..24: note = Synthetic
  source 1..24: mol_type = other DNA
tcacagaagtcacggaggtcaggt

SEQ ID NO: 9687 - DNA, 24 bp, synthetic construct
  misc_feature 1..24: note = Synthetic
  source 1..24: mol_type = other DNA
aagtaattatccaacaatcatggt

SEQ ID NO: 9688 - DNA, 24 bp, synthetic construct
  misc_feature 1..24: note = Synthetic
  source 1..24: mol_type = other DNA
gttgtacaatgcgtgccgggaagg

SEQ ID NO: 9689 - DNA, 24 bp, synthetic construct
  misc_feature 1..24: note = Synthetic
  source 1..24: mol_type = other DNA
cattagatgttgactgatccgcgc

SEQ ID NO: 9690 - DNA, 24 bp, synthetic construct
  misc_feature 1..24: note = Synthetic
  source 1..24: mol_type = other DNA
ggaagcattctgtaacaagtgctt

SEQ ID NO: 9691 - DNA, 24 bp, synthetic construct
  misc_feature 1..24: note = Synthetic
  source 1..24: mol_type = other DNA
cctggagataggttaagcacgtta

SEQ ID NO: 9692 - DNA, 24 bp, synthetic construct
  misc_feature 1..24: note = Synthetic
  source 1..24: mol_type = other DNA
gccgtacagcgcagccggtccgct

SEQ ID NO: 9693 - DNA, 24 bp, synthetic construct
  misc_feature 1..24: note = Synthetic
  source 1..24: mol_type = other DNA
cactacaaacacaacgttagtagc

SEQ ID NO: 9694 - DNA, 24 bp, synthetic construct
  misc_feature 1..24: note = Synthetic
  source 1..24: mol_type = other DNA
tagcattctagcaatcccttgagt

SEQ ID NO: 9695 - DNA, 24 bp, synthetic construct
  misc_feature 1..24: note = Synthetic
  source 1..24: mol_type = other DNA
gctgaaccatcagggtttaattct

SEQ ID NO: 9696 - DNA, 24 bp, synthetic construct
  misc_feature 1..24: note = Synthetic
  source 1..24: mol_type = other DNA
tcacgtagcgcactatgacgaatt

SEQ ID NO: 9697 - DNA, 24 bp, synthetic construct
  misc_feature 1..24: note = Synthetic
  source 1..24: mol_type = other DNA
atacacaaccgagctctatcaaag

SEQ ID NO: 9698 - DNA, 24 bp, synthetic construct
  misc_feature 1..24: note = Synthetic
  source 1..24: mol_type = other DNA
taacaacgtacgcgagccatttgc

SEQ ID NO: 9699 - DNA, 24 bp, synthetic construct
  misc_feature 1..24: note = Synthetic
  source 1..24: mol_type = other DNA
gatgtcaagatggcccgatagcgc

SEQ ID NO: 9700 - DNA, 24 bp, synthetic construct
  misc_feature 1..24: note = Synthetic
  source 1..24: mol_type = other DNA
ccctgtaatagaattgctgaaact

SEQ ID NO: 9701 - DNA, 24 bp, synthetic construct
  misc_feature 1..24: note = Synthetic
  source 1..24: mol_type = other DNA
acgcagctaacgattccaagaggg

SEQ ID NO: 9702 - DNA, 24 bp, synthetic construct
  misc_feature 1..24: note = Synthetic
  source 1..24: mol_type = other DNA
atcatgacaagagacagggatctt

SEQ ID NO: 9703 - DNA, 24 bp, synthetic construct
  misc_feature 1..24: note = Synthetic
  source 1..24: mol_type = other DNA
ttgtcggcatcactttcttagcta

SEQ ID NO: 9704 - DNA, 24 bp, synthetic construct
  misc_feature 1..24: note = Synthetic
  source 1..24: mol_type = other DNA
gcgtaagtagcttacgaacttcgc

SEQ ID NO: 9705 - DNA, 24 bp, synthetic construct
  misc_feature 1..24: note = Synthetic
  source 1..24: mol_type = other DNA
catactatttcagggtgcgtcgtt

SEQ ID NO: 9706 - DNA, 24 bp, synthetic construct
  misc_feature 1..24: note = Synthetic
  source 1..24: mol_type = other DNA
tcgtgcgtctctggccgtgatgtt

SEQ ID NO: 9707 - DNA, 24 bp, synthetic construct
  misc_feature 1..24: note = Synthetic
  source 1..24: mol_type = other DNA
tggtggctttccctacgcatcagt

SEQ ID NO: 9708 - DNA, 24 bp, synthetic construct
  misc_feature 1..24: note = Synthetic
  source 1..24: mol_type = other DNA
attagattcaagcaggtagcgttg

SEQ ID NO: 9709 - DNA, 24 bp, synthetic construct
  misc_feature 1..24: note = Synthetic
  source 1..24: mol_type = other DNA
ccaccacccggtactccaagatat

SEQ ID NO: 9710 - DNA, 24 bp, synthetic construct
  misc_feature 1..24: note = Synthetic
  source 1..24: mol_type = other DNA
ttcgggctcaggtcctactaatac

SEQ ID NO: 9711 - DNA, 24 bp, synthetic construct
  misc_feature 1..24: note = Synthetic
  source 1..24: mol_type = other DNA
aggagatgaatgcctcctcccgtg

SEQ ID NO: 9712 - DNA, 24 bp, synthetic construct
  misc_feature 1..24: note = Synthetic
  source 1..24: mol_type = other DNA
tgtgagattgacttaccctgttca

SEQ ID NO: 9713 - DNA, 24 bp, synthetic construct
  misc_feature 1..24: note = Synthetic
  source 1..24: mol_type = other DNA
ttgcgtccggactgcagcttgacg

SEQ ID NO: 9714 - DNA, 24 bp, synthetic construct
  misc_feature 1..24: note = Synthetic
  source 1..24: mol_type = other DNA
ccttggttcagcaccgggcttcta

SEQ ID NO: 9715 - DNA, 24 bp, synthetic construct
  misc_feature 1..24: note = Synthetic
  source 1..24: mol_type = other DNA
aatcgtcaattgtaacctcgaaag

SEQ ID NO: 9716 - DNA, 24 bp, synthetic construct
  misc_feature 1..24: note = Synthetic
  source 1..24: mol_type = other DNA
tgtcaacaccacttgcctagccac

SEQ ID NO: 9717 - DNA, 24 bp, synthetic construct
  misc_feature 1..24: note = Synthetic
  source 1..24: mol_type = other DNA
ctggctagttccatgatattacca

SEQ ID NO: 9718 - DNA, 24 bp, synthetic construct
  misc_feature 1..24: note = Synthetic
  source 1..24: mol_type = other DNA
acgcaatttacggcctggttgtgg

SEQ ID NO: 9719 - DNA, 24 bp, synthetic construct
  misc_feature 1..24: note = Synthetic
  source 1..24: mol_type = other DNA
ttctcgacaagagtttcgtgagga

SEQ ID NO: 9720 - DNA, 24 bp, synthetic construct
  misc_feature 1..24: note = Synthetic
  source 1..24: mol_type = other DNA
aacgcggtacacgacgcaaattct

SEQ ID NO: 9721 - DNA, 24 bp, synthetic construct
  misc_feature 1..24: note = Synthetic
  source 1..24: mol_type = other DNA
agttctggagtgtttcggagcctt

SEQ ID NO: 9722 - DNA, 24 bp, synthetic construct
  misc_feature 1..24: note = Synthetic
  source 1..24: mol_type = other DNA
cgcgactgtttattagaagcgccc

SEQ ID NO: 9723 - DNA, 24 bp, synthetic construct
  misc_feature 1..24: note = Synthetic
  source 1..24: mol_type = other DNA
gtcattaaaccatttacgacgtcc

SEQ ID NO: 9724 - DNA, 24 bp, synthetic construct
  misc_feature 1..24: note = Synthetic
  source 1..24: mol_type = other DNA
gcctggcggcaatgcggaaacaca

SEQ ID NO: 9725 - DNA, 24 bp, synthetic construct
  misc_feature 1..24: note = Synthetic
  source 1..24: mol_type = other DNA
cccagagcctctccacagatagac

SEQ ID NO: 9726 - DNA, 24 bp, synthetic construct
  misc_feature 1..24: note = Synthetic
  source 1..24: mol_type = other DNA
acctggtgatccagtggcatagtt

SEQ ID NO: 9727 - DNA, 24 bp, synthetic construct
  misc_feature 1..24: note = Synthetic
  source 1..24: mol_type = other DNA
cttagcgcgtgataccagcttgta

SEQ ID NO: 9728 - DNA, 24 bp, synthetic construct
  misc_feature 1..24: note = Synthetic
  source 1..24: mol_type = other DNA
cagcagtaaccaaaccgtggctaa

SEQ ID NO: 9729 - DNA, 24 bp, synthetic construct
  misc_feature 1..24: note = Synthetic
  source 1..24: mol_type = other DNA
ggttcttacaagcaaagatgagag

SEQ ID NO: 9730 - DNA, 24 bp, synthetic construct
  misc_feature 1..24: note = Synthetic
  source 1..24: mol_type = other DNA
gctccacggacattgacagaacga

SEQ ID NO: 9731 - DNA, 24 bp, synthetic construct
  misc_feature 1..24: note = Synthetic
  source 1..24: mol_type = other DNA
aggatagctgtttgttatgatgct

SEQ ID NO: 9732 - DNA, 24 bp, synthetic construct
  misc_feature 1..24: note = Synthetic
  source 1..24: mol_type = other DNA
tgaccacgcgatggacgacgaaga

SEQ ID NO: 9733 - DNA, 24 bp, synthetic construct
  misc_feature 1..24: note = Synthetic
  source 1..24: mol_type = other DNA
atgtaggcaggccacactcttgct

SEQ ID NO: 9734 - DNA, 24 bp, synthetic construct
  misc_feature 1..24: note = Synthetic
  source 1..24: mol_type = other DNA
atgtaaattcaaacttattggtta

SEQ ID NO: 9735 - DNA, 24 bp, synthetic construct
  misc_feature 1..24: note = Synthetic
  source 1..24: mol_type = other DNA
gggttaaggtaatatcgtcttggc

SEQ ID NO: 9736 - DNA, 24 bp, synthetic construct
  misc_feature 1..24: note = Synthetic
  source 1..24: mol_type = other DNA
tcgaatttagggctctgtccttcc

SEQ ID NO: 9737 - DNA, 24 bp, synthetic construct
  misc_feature 1..24: note = Synthetic
  source 1..24: mol_type = other DNA
catgtcatgtcctttaggtggacc

SEQ ID NO: 9738 - DNA, 24 bp, synthetic construct
  misc_feature 1..24: note = Synthetic
  source 1..24: mol_type = other DNA
attgtttcaaaggttctcgaaatg

SEQ ID NO: 9739 - DNA, 24 bp, synthetic construct
  misc_feature 1..24: note = Synthetic
  source 1..24: mol_type = other DNA
cacctatacccacgggttacaatc

SEQ ID NO: 9740 - DNA, 24 bp, synthetic construct
  misc_feature 1..24: note = Synthetic
  source 1..24: mol_type = other DNA
aacgtcggtgcatcgcatgtgcgc

SEQ ID NO: 9741 - DNA, 24 bp, synthetic construct
  misc_feature 1..24: note = Synthetic
  source 1..24: mol_type = other DNA
tggatggccaattaatcagcgctt

SEQ ID NO: 9742 - DNA, 24 bp, synthetic construct
  misc_feature 1..24: note = Synthetic
  source 1..24: mol_type = other DNA
tggccaaaggttaacagggcggcc

SEQ ID NO: 9743 - DNA, 24 bp, synthetic construct
  misc_feature 1..24: note = Synthetic
  source 1..24: mol_type = other DNA
actgacgtaggtcgcgctcatcgg

SEQ ID NO: 9744 - DNA, 24 bp, synthetic construct
  misc_feature 1..24: note = Synthetic
  source 1..24: mol_type = other DNA
ccgcaggtacgagcgcggtcaacc

SEQ ID NO: 9745 - DNA, 24 bp, synthetic construct
  misc_feature 1..24: note = Synthetic
  source 1..24: mol_type = other DNA
ggagcttaacttatggattgcgaa

SEQ ID NO: 9746 - DNA, 24 bp, synthetic construct
  misc_feature 1..24: note = Synthetic
  source 1..24: mol_type = other DNA
atggccacttcgtctagtgtacgt

SEQ ID NO: 9747 - DNA, 24 bp, synthetic construct
  misc_feature 1..24: note = Synthetic
  source 1..24: mol_type = other DNA
tagttccgtacctcatagaagcgg

SEQ ID NO: 9748 - DNA, 24 bp, synthetic construct
  misc_feature 1..24: note = Synthetic
  source 1..24: mol_type = other DNA
tgacccaccggatctgccgcacgc

SEQ ID NO: 9749 - DNA, 24 bp, synthetic construct
  misc_feature 1..24: note = Synthetic
  source 1..24: mol_type = other DNA
gcccggcctttgagtccctccggg

SEQ ID NO: 9750 - DNA, 24 bp, synthetic construct
  misc_feature 1..24: note = Synthetic
  source 1..24: mol_type = other DNA
aaacaccgctccgtgggcagaaga

SEQ ID NO: 9751 - DNA, 24 bp, synthetic construct
  misc_feature 1..24: note = Synthetic
  source 1..24: mol_type = other DNA
gcacgagacaaacccttctaccta

SEQ ID NO: 9752 - DNA, 24 bp, synthetic construct
  misc_feature 1..24: note = Synthetic
  source 1..24: mol_type = other DNA
gatgggagttgctcgaaacagatt

SEQ ID NO: 9753 - DNA, 24 bp, synthetic construct
  misc_feature 1..24: note = Synthetic
  source 1..24: mol_type = other DNA
aactcatgtccgcagctagtctgg

SEQ ID NO: 9754 - DNA, 24 bp, synthetic construct
  misc_feature 1..24: note = Synthetic
  source 1..24: mol_type = other DNA
tgtacccaggcacttatacccttc

SEQ ID NO: 9755 - DNA, 24 bp, synthetic construct
  misc_feature 1..24: note = Synthetic
  source 1..24: mol_type = other DNA
cctgttccacgtgtcacggctaaa

SEQ ID NO: 9756 - DNA, 24 bp, synthetic construct
  misc_feature 1..24: note = Synthetic
  source 1..24: mol_type = other DNA
ggaaacatgccggtttagaacgct

SEQ ID NO: 9757 - DNA, 24 bp, synthetic construct
  misc_feature 1..24: note = Synthetic
  source 1..24: mol_type = other DNA
gcaactcttcaaggccacccaggt

SEQ ID NO: 9758 - DNA, 24 bp, synthetic construct
  misc_feature 1..24: note = Synthetic
  source 1..24: mol_type = other DNA
cgtaccaatctgcacttcggtggc

SEQ ID NO: 9759 - DNA, 24 bp, synthetic construct
  misc_feature 1..24: note = Synthetic
  source 1..24: mol_type = other DNA
tcccgagtcatccggcgcagttgt

SEQ ID NO: 9760 - DNA, 24 bp, synthetic construct
  misc_feature 1..24: note = Synthetic
  source 1..24: mol_type = other DNA
cgacacttgatactacgagttcta

SEQ ID NO: 9761 - DNA, 24 bp, synthetic construct
  misc_feature 1..24: note = Synthetic
  source 1..24: mol_type = other DNA
cgcatactggcgattagtacgtgt

SEQ ID NO: 9762 - DNA, 24 bp, synthetic construct
  misc_feature 1..24: note = Synthetic
  source 1..24: mol_type = other DNA
agcagtaggtatttctcatgcctg

SEQ ID NO: 9763 - DNA, 24 bp, synthetic construct
  misc_feature 1..24: note = Synthetic
  source 1..24: mol_type = other DNA
ggtctttagtcactcaacctacgg

SEQ ID NO: 9764 - DNA, 24 bp, synthetic construct
  misc_feature 1..24: note = Synthetic
  source 1..24: mol_type = other DNA
cgatccatcctccggtcgtgggaa

SEQ ID NO: 9765 - DNA, 24 bp, synthetic construct
  misc_feature 1..24: note = Synthetic
  source 1..24: mol_type = other DNA
gggcgtaacatggttagacataac

SEQ ID NO: 9766 - DNA, 24 bp, synthetic construct
  misc_feature 1..24: note = Synthetic
  source 1..24: mol_type = other DNA
ttgggtattagaacgagcttagtt

SEQ ID NO: 9767 - DNA, 24 bp, synthetic construct
  misc_feature 1..24: note = Synthetic
  source 1..24: mol_type = other DNA
caatttactacgttcactatatct

SEQ ID NO: 9768 - DNA, 24 bp, synthetic construct
  misc_feature 1..24: note = Synthetic
  source 1..24: mol_type = other DNA
agatggtcccaagtttaatttccg

SEQ ID NO: 9769 - DNA, 24 bp, synthetic construct
  misc_feature 1..24: note = Synthetic
  source 1..24: mol_type = other DNA
ggttctcgtctctttatagtaaac

SEQ ID NO: 9770 - DNA, 24 bp, synthetic construct
  misc_feature 1..24: note = Synthetic
  source 1..24: mol_type = other DNA
aatcgtcgaggttctcctcaaagg

SEQ ID NO: 9771 - DNA, 24 bp, synthetic construct
  misc_feature 1..24: note = Synthetic
  source 1..24: mol_type = other DNA
cacgccttcaatacgggcgcgcat

SEQ ID NO: 9772 - DNA, 24 bp, synthetic construct
  misc_feature 1..24: note = Synthetic
  source 1..24: mol_type = other DNA
caataaccgtccacactgtctccc

SEQ ID NO: 9773 - DNA, 24 bp, synthetic construct
  misc_feature 1..24: note = Synthetic
  source 1..24: mol_type = other DNA
attaccgcaggtcatggaggcacg

SEQ ID NO: 9774 - DNA, 24 bp, synthetic construct
  misc_feature 1..24: note = Synthetic
  source 1..24: mol_type = other DNA
gcaacacggttcaacacttaaagt

SEQ ID NO: 9775 - DNA, 24 bp, synthetic construct
  misc_feature 1..24: note = Synthetic
  source 1..24: mol_type = other DNA
cggagtctcaggaggccttaggtt

SEQ ID NO: 9776 - DNA, 24 bp, synthetic construct
  misc_feature 1..24: note = Synthetic
  source 1..24: mol_type = other DNA
ggtcgcgaccattgtaagcccttc

SEQ ID NO: 9777 - DNA, 24 bp, synthetic construct
  misc_feature 1..24: note = Synthetic
  source 1..24: mol_type = other DNA
tcattcgcattacggccaaccggt

SEQ ID NO: 9778 - DNA, 24 bp, synthetic construct
  misc_feature 1..24: note = Synthetic
  source 1..24: mol_type = other DNA
agaagagcatttgactgagctcaa

SEQ ID NO: 9779 - DNA, 24 bp, synthetic construct
  misc_feature 1..24: note = Synthetic
  source 1..24: mol_type = other DNA
ggcatccaatgacatatacagatt

SEQ ID NO: 9780 - DNA, 24 bp, synthetic construct
  misc_feature 1..24: note = Synthetic
  source 1..24: mol_type = other DNA
cggcatgttcactcctgactatag

SEQ ID NO: 9781 - DNA, 24 bp, synthetic construct
  misc_feature 1..24: note = Synthetic
  source 1..24: mol_type = other DNA
gtgacagaaaccgaatgcgctttg

SEQ ID NO: 9782 - DNA, 24 bp, synthetic construct
  misc_feature 1..24: note = Synthetic
  source 1..24: mol_type = other DNA
atgtctgcgaagtactccctattt

SEQ ID NO: 9783 - DNA, 24 bp, synthetic construct
  misc_feature 1..24: note = Synthetic
  source 1..24: mol_type = other DNA
cagtaatcctacgtaatgtgggcc

SEQ ID NO: 9784 - DNA, 24 bp, synthetic construct
  misc_feature 1..24: note = Synthetic
  source 1..24: mol_type = other DNA
tacagcccagccaattcagtggga

SEQ ID NO: 9785 - DNA, 24 bp, synthetic construct
  misc_feature 1..24: note = Synthetic
  source 1..24: mol_type = other DNA
cggacttacatgccgctactgact

SEQ ID NO: 9786 - DNA, 24 bp, synthetic construct
  misc_feature 1..24: note = Synthetic
  source 1..24: mol_type = other DNA
gttaagtcgtagaggttaagacat

SEQ ID NO: 9787 - DNA, 24 bp, synthetic construct
  misc_feature 1..24: note = Synthetic
  source 1..24: mol_type = other DNA
tatggtgaagattcatgctagggt

SEQ ID NO: 9788 - DNA, 24 bp, synthetic construct
  misc_feature 1..24: note = Synthetic
  source 1..24: mol_type = other DNA
gacataagtaggtactcaatactt

SEQ ID NO: 9789 - DNA, 24 bp, synthetic construct
  misc_feature 1..24: note = Synthetic
  source 1..24: mol_type = other DNA
gatacatattagtaagtccgtgcc

SEQ ID NO: 9790 - DNA, 24 bp, synthetic construct
  misc_feature 1..24: note = Synthetic
  source 1..24: mol_type = other DNA
catagtatgattcgcgcgccgtgt

SEQ ID NO: 9791 - DNA, 24 bp, synthetic construct
  misc_feature 1..24: note = Synthetic
  source 1..24: mol_type = other DNA
tgtctttcccggtaagactttgtc

SEQ ID NO: 9792 - DNA, 24 bp, synthetic construct
  misc_feature 1..24: note = Synthetic
  source 1..24: mol_type = other DNA
ctgcctcaactggtgcttagcgca

SEQ ID NO: 9793 - DNA, 24 bp, synthetic construct
  misc_feature 1..24: note = Synthetic
  source 1..24: mol_type = other DNA
acctccttcccgtgtcacctaccg

SEQ ID NO: 9794 - DNA, 24 bp, synthetic construct
  misc_feature 1..24: note = Synthetic
  source 1..24: mol_type = other DNA
ccacgacatcttggcactcgtcgg

SEQ ID NO: 9795 - DNA, 24 bp, synthetic construct
  misc_feature 1..24: note = Synthetic
  source 1..24: mol_type = other DNA
ttgaggcttccacacaggtagatt

SEQ ID NO: 9796 - DNA, 24 bp, synthetic construct
  misc_feature 1..24: note = Synthetic
  source 1..24: mol_type = other DNA
tacaggacccgaccctacccacgg

SEQ ID NO: 9797 - DNA, 24 bp, synthetic construct
  misc_feature 1..24: note = Synthetic
  source 1..24: mol_type = other DNA
acacctgtgttgttgttctgactc

SEQ ID NO: 9798 - DNA, 24 bp, synthetic construct
  misc_feature 1..24: note = Synthetic
  source 1..24: mol_type = other DNA
ttctattagtgtagtaacggtatt

SEQ ID NO: 9799 - DNA, 24 bp, synthetic construct
  misc_feature 1..24: note = Synthetic
  source 1..24: mol_type = other DNA
cagtgttgtccggtggcttctgtt

SEQ ID NO: 9800 - DNA, 24 bp, synthetic construct
  misc_feature 1..24: note = Synthetic
  source 1..24: mol_type = other DNA
atccgacctcggaggtaacgtgtt

SEQ ID NO: 9801 - DNA, 24 bp, synthetic construct
  misc_feature 1..24: note = Synthetic
  source 1..24: mol_type = other DNA
caaagatcttgcgaggagtacaat

SEQ ID NO: 9802 - DNA, 24 bp, synthetic construct
  misc_feature 1..24: note = Synthetic
  source 1..24: mol_type = other DNA
tgctcgcgataaagaggcgatgtt

SEQ ID NO: 9803 - DNA, 24 bp, synthetic construct
  misc_feature 1..24: note = Synthetic
  source 1..24: mol_type = other DNA
gggagctctcgaatggatctcccg

SEQ ID NO: 9804 - DNA, 24 bp, synthetic construct
  misc_feature 1..24: note = Synthetic
  source 1..24: mol_type = other DNA
agaacggatcagccacggatctac

SEQ ID NO: 9805 - DNA, 24 bp, synthetic construct
  misc_feature 1..24: note = Synthetic
  source 1..24: mol_type = other DNA
atgttctatccacctcgtagctac

SEQ ID NO: 9806 - DNA, 24 bp, synthetic construct
  misc_feature 1..24: note = Synthetic
  source 1..24: mol_type = other DNA
ggtggtaaatcactctcagcctgg

SEQ ID NO: 9807 - DNA, 24 bp, synthetic construct
  misc_feature 1..24: note = Synthetic
  source 1..24: mol_type = other DNA
tgccctggtattcccacggtcata

SEQ ID NO: 9808 - DNA, 24 bp, synthetic construct
  misc_feature 1..24: note = Synthetic
  source 1..24: mol_type = other DNA
aatcatcagtcgcgacaaagattc

SEQ ID NO: 9809 - DNA, 24 bp, synthetic construct
  misc_feature 1..24: note = Synthetic
  source 1..24: mol_type = other DNA
aagatatgcgtcatacgtcggctg

SEQ ID NO: 9810 - DNA, 24 bp, synthetic construct
  misc_feature 1..24: note = Synthetic
  source 1..24: mol_type = other DNA
cgtgttagaaattgagccgagtct

SEQ ID NO: 9811 - DNA, 24 bp, synthetic construct
  misc_feature 1..24: note = Synthetic
  source 1..24: mol_type = other DNA
cgcgcagttcggtaacgtacagca

SEQ ID NO: 9812 - DNA, 24 bp, synthetic construct
  misc_feature 1..24: note = Synthetic
  source 1..24: mol_type = other DNA
taagcgaaagtgtgtcttaatgca

SEQ ID NO: 9813 - DNA, 24 bp, synthetic construct
  misc_feature 1..24: note = Synthetic
  source 1..24: mol_type = other DNA
tactttaccgtaacgtgcaccaac

SEQ ID NO: 9814 - DNA, 24 bp, synthetic construct
  misc_feature 1..24: note = Synthetic
  source 1..24: mol_type = other DNA
tagatggctatcgattataatcaa

SEQ ID NO: 9815 - DNA, 24 bp, synthetic construct
  misc_feature 1..24: note = Synthetic
  source 1..24: mol_type = other DNA
aagtttgttcaggcatattcggcg

SEQ ID NO: 9816 - DNA, 24 bp, synthetic construct
  misc_feature 1..24: note = Synthetic
  source 1..24: mol_type = other DNA
ggacgacatcttacttaatctgtg

SEQ ID NO: 9817 - DNA, 24 bp, synthetic construct
  misc_feature 1..24: note = Synthetic
  source 1..24: mol_type = other DNA
acgcgaagaattgggcgtccagac

SEQ ID NO: 9818 - DNA, 24 bp, synthetic construct
  misc_feature 1..24: note = Synthetic
  source 1..24: mol_type = other DNA
atgattacgtatctgactaaatag

SEQ ID NO: 9819 - DNA, 24 bp, synthetic construct
  misc_feature 1..24: note = Synthetic
  source 1..24: mol_type = other DNA
cgcggaagactctagttcgtgtct

SEQ ID NO: 9820 - DNA, 24 bp, synthetic construct
  misc_feature 1..24: note = Synthetic
  source 1..24: mol_type = other DNA
caatgtgagtggttctcttacaag

SEQ ID NO: 9821 - DNA, 24 bp, synthetic construct
  misc_feature 1..24: note = Synthetic
  source 1..24: mol_type = other DNA
accagtagtctgatagaaggatgt

SEQ ID NO: 9822 - DNA, 24 bp, synthetic construct
  misc_feature 1..24: note = Synthetic
  source 1..24: mol_type = other DNA
acgcatagcaccgtggaccgtgaa

SEQ ID NO: 9823 - DNA, 24 bp, synthetic construct
  misc_feature 1..24: note = Synthetic
  source 1..24: mol_type = other DNA
caacgattatataacctctgtcta

SEQ ID NO: 9824 - DNA, 24 bp, synthetic construct
  misc_feature 1..24: note = Synthetic
  source 1..24: mol_type = other DNA
agccacaaaggtctttgcataaga

SEQ ID NO: 9825 - DNA, 24 bp, synthetic construct
  misc_feature 1..24: note = Synthetic
  source 1..24: mol_type = other DNA
tggattcactgggctatagtctga

SEQ ID NO: 9826 - DNA, 24 bp, synthetic construct
  misc_feature 1..24: note = Synthetic
  source 1..24: mol_type = other DNA
tcggtgctatattactttgataat

SEQ ID NO: 9827 - DNA, 24 bp, synthetic construct
  misc_feature 1..24: note = Synthetic
  source 1..24: mol_type = other DNA
aacaacccgcacgtcacgccgcgg

SEQ ID NO: 9828 - DNA, 24 bp, synthetic construct
  misc_feature 1..24: note = Synthetic
  source 1..24: mol_type = other DNA
catcaggatgtgctcacgcgcgac

SEQ ID NO: 9829 - DNA, 24 bp, synthetic construct
  misc_feature 1..24: note = Synthetic
  source 1..24: mol_type = other DNA
tttctgttcgctgtaggtcaagca

SEQ ID NO: 9830 - DNA, 24 bp, synthetic construct
  misc_feature 1..24: note = Synthetic
  source 1..24: mol_type = other DNA
caaccgccaaaggaccgctgcgac

SEQ ID NO: 9831 - DNA, 24 bp, synthetic construct
  misc_feature 1..24: note = Synthetic
  source 1..24: mol_type = other DNA
ctcggccctctaccggatcgggta

SEQ ID NO: 9832 - DNA, 24 bp, synthetic construct
  misc_feature 1..24: note = Synthetic
  source 1..24: mol_type = other DNA
agtctttgggtgtctgttacgtgg

SEQ ID NO: 9833 - DNA, 24 bp, synthetic construct
  misc_feature 1..24: note = Synthetic
  source 1..24: mol_type = other DNA
tggtagtgattgttcaatctatga

SEQ ID NO: 9834 - DNA, 24 bp, synthetic construct
  misc_feature 1..24: note = Synthetic
  source 1..24: mol_type = other DNA
tttgatatcgtacttctcacaaat

SEQ ID NO: 9835 - DNA, 24 bp, synthetic construct
  misc_feature 1..24: note = Synthetic
  source 1..24: mol_type = other DNA
cgatgatcagggctgcgcccgtac

SEQ ID NO: 9836 - DNA, 24 bp, synthetic construct
  misc_feature 1..24: note = Synthetic
  source 1..24: mol_type = other DNA
ccgagcgttagtcctgcctcatcg

SEQ ID NO: 9837 - DNA, 24 bp, synthetic construct
  misc_feature 1..24: note = Synthetic
  source 1..24: mol_type = other DNA
ttcggctgaccgtgtcttaacaac

SEQ ID NO: 9838 - DNA, 24 bp, synthetic construct
  misc_feature 1..24: note = Synthetic
  source 1..24: mol_type = other DNA
aggaggcgtgaacgtattgacgta

SEQ ID NO: 9839 - DNA, 24 bp, synthetic construct
  misc_feature 1..24: note = Synthetic
  source 1..24: mol_type = other DNA
ggagcgctagaatggtccgtctca

SEQ ID NO: 9840 - DNA, 24 bp, synthetic construct
  misc_feature 1..24: note = Synthetic
  source 1..24: mol_type = other DNA
ctcggctatcccatcgtgcagtat

SEQ ID NO: 9841 - DNA, 24 bp, synthetic construct
  misc_feature 1..24: note = Synthetic
  source 1..24: mol_type = other DNA
gcaccaaatccgtgacaggagggt

SEQ ID NO: 9842 - DNA, 24 bp, synthetic construct
  misc_feature 1..24: note = Synthetic
  source 1..24: mol_type = other DNA
tagacggagtacgtcgcccgtacg

SEQ ID NO: 9843 - DNA, 24 bp, synthetic construct
  misc_feature 1..24: note = Synthetic
  source 1..24: mol_type = other DNA
atagacgcgatggtaactatattt

SEQ ID NO: 9844 - DNA, 24 bp, synthetic construct
  misc_feature 1..24: note = Synthetic
  source 1..24: mol_type = other DNA
tttgtatccgagactttcaattgt

SEQ ID NO: 9845 - DNA, 24 bp, synthetic construct
  misc_feature 1..24: note = Synthetic
  source 1..24: mol_type = other DNA
tgttacgatgagcagctaattgag

SEQ ID NO: 9846 - DNA, 24 bp, synthetic construct
  misc_feature 1..24: note = Synthetic
  source 1..24: mol_type = other DNA
tgcgaagacccggttccatatcgt

SEQ ID NO: 9847 - DNA, 24 bp, synthetic construct
  misc_feature 1..24: note = Synthetic
  source 1..24: mol_type = other DNA
aacgagagcaatgctcggagtgtc

SEQ ID NO: 9848 - DNA, 24 bp, synthetic construct
  misc_feature 1..24: note = Synthetic
  source 1..24: mol_type = other DNA
catcacgcggaagtgtgacgcgtg

SEQ ID NO: 9849 - DNA, 24 bp, synthetic construct
  misc_feature 1..24: note = Synthetic
  source 1..24: mol_type = other DNA
tagccgtcgacgttgtaagatgta

SEQ ID NO: 9850 - DNA, 24 bp, synthetic construct
  misc_feature 1..24: note = Synthetic
  source 1..24: mol_type = other DNA
caactcctagggtcccacacaacc

SEQ ID NO: 9851 - DNA, 24 bp, synthetic construct
  misc_feature 1..24: note = Synthetic
  source 1..24: mol_type = other DNA
agccatgcaattctagttcggata

SEQ ID NO: 9852 - DNA, 24 bp, synthetic construct
  misc_feature 1..24: note = Synthetic
  source 1..24: mol_type = other DNA
caaacctactctattatcctatgt

SEQ ID NO: 9853 - DNA, 24 bp, synthetic construct
  misc_feature 1..24: note = Synthetic
  source 1..24: mol_type = other DNA
tatacgcagcgcgacatttctgcg

SEQ ID NO: 9854 - DNA, 24 bp, synthetic construct
  misc_feature 1..24: note = Synthetic
  source 1..24: mol_type = other DNA
aaatctaaagaaagctaatggtct

SEQ ID NO: 9855 - DNA, 24 bp, synthetic construct
  misc_feature 1..24: note = Synthetic
  source 1..24: mol_type = other DNA
ctcgtgtagcgacgaagatgctga

SEQ ID NO: 9856 - DNA, 24 bp, synthetic construct
  misc_feature 1..24: note = Synthetic
  source 1..24: mol_type = other DNA
gcaaactggtctcgggtgttatag

SEQ ID NO: 9857 - DNA, 24 bp, synthetic construct
  misc_feature 1..24: note = Synthetic
  source 1..24: mol_type = other DNA
taaatgcttactgctggaattgga

SEQ ID NO: 9858 - DNA, 24 bp, synthetic construct
  misc_feature 1..24: note = Synthetic
  source 1..24: mol_type = other DNA
atggtcatcacgatcttaaatagg

SEQ ID NO: 9859 - DNA, 24 bp, synthetic construct
  misc_feature 1..24: note = Synthetic
  source 1..24: mol_type = other DNA
cttctcccacaacgccggtccgaa

SEQ ID NO: 9860 - DNA, 24 bp, synthetic construct
  misc_feature 1..24: note = Synthetic
  source 1..24: mol_type = other DNA
gccactggttccaactacgccacg

SEQ ID NO: 9861 - DNA, 24 bp, synthetic construct
  misc_feature 1..24: note = Synthetic
  source 1..24: mol_type = other DNA
attgatggcatcgcgagcgcacgt

SEQ ID NO: 9862 - DNA, 24 bp, synthetic construct
  misc_feature 1..24: note = Synthetic
  source 1..24: mol_type = other DNA
gtcatgagccgacatcactgagat

SEQ ID NO: 9863 - DNA, 24 bp, synthetic construct
  misc_feature 1..24: note = Synthetic
  source 1..24: mol_type = other DNA
gtagtcttggacgtaataagtccc

SEQ ID NO: 9864 - DNA, 24 bp, synthetic construct
  misc_feature 1..24: note = Synthetic
  source 1..24: mol_type = other DNA
ccctcggtacgcaacgtattcccg

SEQ ID NO: 9865 - DNA, 24 bp, synthetic construct
  misc_feature 1..24: note = Synthetic
  source 1..24: mol_type = other DNA
caaacggcgcagattcaatctatc

SEQ ID NO: 9866 - DNA, 24 bp, synthetic construct
  misc_feature 1..24: note = Synthetic
  source 1..24: mol_type = other DNA
catcccttagattgatcgggtacc

SEQ ID NO: 9867 - DNA, 24 bp, synthetic construct
  misc_feature 1..24: note = Synthetic
  source 1..24: mol_type = other DNA
ctggaacctttgccaacctcgaaa

SEQ ID NO: 9868 - DNA, 24 bp, synthetic construct
  misc_feature 1..24: note = Synthetic
  source 1..24: mol_type = other DNA
gcgtgcaataaacgacaagctcgg

SEQ ID NO: 9869 - DNA, 24 bp, synthetic construct
  misc_feature 1..24: note = Synthetic
  source 1..24: mol_type = other DNA
ctggtggacgtgtgcggttatggt

SEQ ID NO: 9870 - DNA, 24 bp, synthetic construct
  misc_feature 1..24: note = Synthetic
  source 1..24: mol_type = other DNA
taggccgccgaatcccatcctctg

SEQ ID NO: 9871 - DNA, 24 bp, synthetic construct
  misc_feature 1..24: note = Synthetic
  source 1..24: mol_type = other DNA
tctcctaagatagtttgttggccg

SEQ ID NO: 9872 - DNA, 24 bp, synthetic construct
  misc_feature 1..24: note = Synthetic
  source 1..24: mol_type = other DNA
cctttatgtagcgatccgagcagc

SEQ ID NO: 9873 - DNA, 24 bp, synthetic construct
  misc_feature 1..24: note = Synthetic
  source 1..24: mol_type = other DNA
tcttccgtccatccctagctacct

SEQ ID NO: 9874 - DNA, 24 bp, synthetic construct
  misc_feature 1..24: note = Synthetic
  source 1..24: mol_type = other DNA
gattagagcaagattatccgcaac

SEQ ID NO: 9875 - DNA, 24 bp, synthetic construct
  misc_feature 1..24: note = Synthetic
  source 1..24: mol_type = other DNA
aatctctctagcgtaagctttctc

SEQ ID NO: 9876 - DNA, 24 bp, synthetic construct
  misc_feature 1..24: note = Synthetic
  source 1..24: mol_type = other DNA
acaatgcatcgttaataaacgaag

SEQ ID NO: 9877 - DNA, 24 bp, synthetic construct
  misc_feature 1..24: note = Synthetic
  source 1..24: mol_type = other DNA
actgtccggcttgccagtggatgg

SEQ ID NO: 9878 - DNA, 24 bp, synthetic construct
  misc_feature 1..24: note = Synthetic
  source 1..24: mol_type = other DNA
ccctaagtccgggtcagatgtttg

SEQ ID NO: 9879 - DNA, 24 bp, synthetic construct
  misc_feature 1..24: note = Synthetic
  source 1..24: mol_type = other DNA
ctgccgggtctcattcgtgcgtca

SEQ ID NO: 9880 - DNA, 24 bp, synthetic construct
  misc_feature 1..24: note = Synthetic
  source 1..24: mol_type = other DNA
ttcctttacatgcttacgttgttc

SEQ ID NO: 9881 - DNA, 24 bp, synthetic construct
  misc_feature 1..24: note = Synthetic
  source 1..24: mol_type = other DNA
ttgagtgtgtacacaatcggtaag

SEQ ID NO: 9882 - DNA, 24 bp, synthetic construct
  misc_feature 1..24: note = Synthetic
  source 1..24: mol_type = other DNA
gacagttctttcaaccacgggtac

SEQ ID NO: 9883 - DNA, 24 bp, synthetic construct
  misc_feature 1..24: note = Synthetic
  source 1..24: mol_type = other DNA
gtcaagggctttcacgcacactgt

SEQ ID NO: 9884 - DNA, 24 bp, synthetic construct
  misc_feature 1..24: note = Synthetic
  source 1..24: mol_type = other DNA
atgctagaacaactcgcagagtgg

SEQ ID NO: 9885 - DNA, 24 bp, synthetic construct
  misc_feature 1..24: note = Synthetic
  source 1..24: mol_type = other DNA
gcacatatagttattctagaagtt

SEQ ID NO: 9886 - DNA, 24 bp, synthetic construct
  misc_feature 1..24: note = Synthetic
  source 1..24: mol_type = other DNA
gaagcggtgatggaactcccgagg

SEQ ID NO: 9887 - DNA, 24 bp, synthetic construct
  misc_feature 1..24: note = Synthetic
  source 1..24: mol_type = other DNA
gaggcggacaacagtgtagtatag

SEQ ID NO: 9888 - DNA, 24 bp, synthetic construct
  misc_feature 1..24: note = Synthetic
  source 1..24: mol_type = other DNA
ctgatgagatctgtacgcaatctg

SEQ ID NO: 9889 - DNA, 24 bp, synthetic construct
  misc_feature 1..24: note = Synthetic
  source 1..24: mol_type = other DNA
aaggagtgtgccgactgactatca

SEQ ID NO: 9890 - DNA, 24 bp, synthetic construct
  misc_feature 1..24: note = Synthetic
  source 1..24: mol_type = other DNA
ttggaacacttgatagggatagaa

SEQ ID NO: 9891 - DNA, 24 bp, synthetic construct
  misc_feature 1..24: note = Synthetic
  source 1..24: mol_type = other DNA
catgcgggattctatgggcgcagg

SEQ ID NO: 9892 - DNA, 24 bp, synthetic construct
  misc_feature 1..24: note = Synthetic
  source 1..24: mol_type = other DNA
tgactccgacacgtctcaatggct

SEQ ID NO: 9893 - DNA, 24 bp, synthetic construct
  misc_feature 1..24: note = Synthetic
  source 1..24: mol_type = other DNA
tctcatcgaattaccacagaatag

SEQ ID NO: 9894 - DNA, 24 bp, synthetic construct
  misc_feature 1..24: note = Synthetic
  source 1..24: mol_type = other DNA
atgtctcgtctcgcgggctcgcat

SEQ ID NO: 9895 - DNA, 24 bp, synthetic construct
  misc_feature 1..24: note = Synthetic
  source 1..24: mol_type = other DNA
cttaatcgtactacgggaattata

SEQ ID NO: 9896 - DNA, 24 bp, synthetic construct
  misc_feature 1..24: note = Synthetic
  source 1..24: mol_type = other DNA
tgaagcgaagccatttgaactgcc

SEQ ID NO: 9897 - DNA, 24 bp, synthetic construct
  misc_feature 1..24: note = Synthetic
  source 1..24: mol_type = other DNA
atcttacgcgcgtggtcggcactg

SEQ ID NO: 9898 - DNA, 24 bp, synthetic construct
  misc_feature 1..24: note = Synthetic
  source 1..24: mol_type = other DNA
tacgtccgagcttcactagagtgc

SEQ ID NO: 9899 - DNA, 24 bp, synthetic construct
  misc_feature 1..24: note = Synthetic
  source 1..24: mol_type = other DNA
gctctatgggtaacccagtgttcg

SEQ ID NO: 9900 - DNA, 24 bp, synthetic construct
  misc_feature 1..24: note = Synthetic
  source 1..24: mol_type = other DNA
tctcgcatggtcccgctgctttcg

SEQ ID NO: 9901 - DNA, 24 bp, synthetic construct
  misc_feature 1..24: note = Synthetic
  source 1..24: mol_type = other DNA
acctggacggcacatctaccgaga

SEQ ID NO: 9902 - DNA, 24 bp, synthetic construct
  misc_feature 1..24: note = Synthetic
  source 1..24: mol_type = other DNA
ttcggtcgcgaactgatttcgttt

SEQ ID NO: 9903 - DNA, 24 bp, synthetic construct
  misc_feature 1..24: note = Synthetic
  source 1..24: mol_type = other DNA
cgaatgctcgccaccttggtgaca

SEQ ID NO: 9904 - DNA, 24 bp, synthetic construct
  misc_feature 1..24: note = Synthetic
  source 1..24: mol_type = other DNA
ttcgcccgtatagatacgtccata

SEQ ID NO: 9905 - DNA, 24 bp, synthetic construct
  misc_feature 1..24: note = Synthetic
  source 1..24: mol_type = other DNA
gctcggtcggctgtcctcttaact

SEQ ID NO: 9906 - DNA, 24 bp, synthetic construct
  misc_feature 1..24: note = Synthetic
  source 1..24: mol_type = other DNA
cgtagatccggccatgctcccgct

SEQ ID NO: 9907 - DNA, 24 bp, synthetic construct
  misc_feature 1..24: note = Synthetic
  source 1..24: mol_type = other DNA
ccaggacttagacgtacgtcgcgc

SEQ ID NO: 9908 - DNA, 24 bp, synthetic construct
  misc_feature 1..24: note = Synthetic
  source 1..24: mol_type = other DNA
tgggaaggactatgccttaaccgg

SEQ ID NO: 9909 - DNA, 24 bp, synthetic construct
  misc_feature 1..24: note = Synthetic
  source 1..24: mol_type = other DNA
ctagttgttggcctaggcgttaac

SEQ ID NO: 9910 - DNA, 24 bp, synthetic construct
  misc_feature 1..24: note = Synthetic
  source 1..24: mol_type = other DNA
aagaaacgacaccgacccaacgga

SEQ ID NO: 9911 - DNA, 24 bp, synthetic construct
  misc_feature 1..24: note = Synthetic
  source 1..24: mol_type = other DNA
cgtaggagtgggacttgagcacat

SEQ ID NO: 9912 - DNA, 24 bp, synthetic construct
  misc_feature 1..24: note = Synthetic
  source 1..24: mol_type = other DNA
ttccaccctctaaatatggaccaa

SEQ ID NO: 9913 - DNA, 24 bp, synthetic construct
  misc_feature 1..24: note = Synthetic
  source 1..24: mol_type = other DNA
cttcaccacctttcccggattcaa

SEQ ID NO: 9914 - DNA, 24 bp, synthetic construct
  misc_feature 1..24: note = Synthetic
  source 1..24: mol_type = other DNA
ccttgggtaatatcgccgcagtga

SEQ ID NO: 9915 - DNA, 24 bp, synthetic construct
  misc_feature 1..24: note = Synthetic
  source 1..24: mol_type = other DNA
atagatagaaagtgctacttatca

SEQ ID NO: 9916 - DNA, 24 bp, synthetic construct
  misc_feature 1..24: note = Synthetic
  source 1..24: mol_type = other DNA
cctgttcaatcgaatagttaggat

SEQ ID NO: 9917 - DNA, 24 bp, synthetic construct
  misc_feature 1..24: note = Synthetic
  source 1..24: mol_type = other DNA
agcatccttgactactgtctcggg

SEQ ID NO: 9918 - DNA, 24 bp, synthetic construct
  misc_feature 1..24: note = Synthetic
  source 1..24: mol_type = other DNA
agggtgcatgaaccgaagccgtct

SEQ ID NO: 9919 - DNA, 24 bp, synthetic construct
  misc_feature 1..24: note = Synthetic
  source 1..24: mol_type = other DNA
ttcactgctatctctctaaaccag

SEQ ID NO: 9920 - DNA, 24 bp, synthetic construct
  misc_feature 1..24: note = Synthetic
  source 1..24: mol_type = other DNA
ctcttaccacaaatgggataccga

SEQ ID NO: 9921 - DNA, 24 bp, synthetic construct
  misc_feature 1..24: note = Synthetic
  source 1..24: mol_type = other DNA
cgtcatacaatggcgttccacgac

SEQ ID NO: 9922 - DNA, 24 bp, synthetic construct
  misc_feature 1..24: note = Synthetic
  source 1..24: mol_type = other DNA
taccaggacacccgtggagtacga

SEQ ID NO: 9923 - DNA, 24 bp, synthetic construct
  misc_feature 1..24: note = Synthetic
  source 1..24: mol_type = other DNA
gataccgaggccaaacagcaatat

SEQ ID NO: 9924 - DNA, 24 bp, synthetic construct
  misc_feature 1..24: note = Synthetic
  source 1..24: mol_type = other DNA
acttaataagagtctcagtagctc

SEQ ID NO: 9925 - DNA, 24 bp, synthetic construct
  misc_feature 1..24: note = Synthetic
  source 1..24: mol_type = other DNA
ggtgacaaatctgaggataatggt

SEQ ID NO: 9926 - DNA, 24 bp, synthetic construct
  misc_feature 1..24: note = Synthetic
  source 1..24: mol_type = other DNA
aacttagaagctggattccttcgt

SEQ ID NO: 9927 - DNA, 24 bp, synthetic construct
  misc_feature 1..24: note = Synthetic
  source 1..24: mol_type = other DNA
gcaacgacttgctcggttctgaac

SEQ ID NO: 9928 - DNA, 24 bp, synthetic construct
  misc_feature 1..24: note = Synthetic
  source 1..24: mol_type = other DNA
tccggatcgggctctggttcaacc

SEQ ID NO: 9929 - DNA, 24 bp, synthetic construct
  misc_feature 1..24: note = Synthetic
  source 1..24: mol_type = other DNA
gctcgaggtccaaggcaccatagg

SEQ ID NO: 9930 - DNA, 24 bp, synthetic construct
  misc_feature 1..24: note = Synthetic
  source 1..24: mol_type = other DNA
ccaaccgagagtctcgtcttccca

SEQ ID NO: 9931 - DNA, 24 bp, synthetic construct
  misc_feature 1..24: note = Synthetic
  source 1..24: mol_type = other DNA
gatcgagccttctagggccatgta

SEQ ID NO: 9932 - DNA, 24 bp, synthetic construct
  misc_feature 1..24: note = Synthetic
  source 1..24: mol_type = other DNA
cccgcatccgtcacgagtaagtat

SEQ ID NO: 9933 - DNA, 24 bp, synthetic construct
  misc_feature 1..24: note = Synthetic
  source 1..24: mol_type = other DNA
acgggcctcgcagtattgaggtag

SEQ ID NO: 9934 - DNA, 24 bp, synthetic construct
  misc_feature 1..24: note = Synthetic
  source 1..24: mol_type = other DNA
gccggtcctaagaaacggatagta

SEQ ID NO: 9935 - DNA, 24 bp, synthetic construct
  misc_feature 1..24: note = Synthetic
  source 1..24: mol_type = other DNA
tcaggtaatcgtagacatataact

SEQ ID NO: 9936 - DNA, 24 bp, synthetic construct
  misc_feature 1..24: note = Synthetic
  source 1..24: mol_type = other DNA
atatgaacgtatggcatagcgtga

SEQ ID NO: 9937 - DNA, 24 bp, synthetic construct
  misc_feature 1..24: note = Synthetic
  source 1..24: mol_type = other DNA
cgtgtagcgttctctccgttggag

SEQ ID NO: 9938 - DNA, 24 bp, synthetic construct
  misc_feature 1..24: note = Synthetic
  source 1..24: mol_type = other DNA
aaacgaaagtccagtaggcccaag

SEQ ID NO: 9939 - DNA, 24 bp, synthetic construct
  misc_feature 1..24: note = Synthetic
  source 1..24: mol_type = other DNA
ttcttctctatgaagggcattcta

SEQ ID NO: 9940 - DNA, 24 bp, synthetic construct
  misc_feature 1..24: note = Synthetic
  source 1..24: mol_type = other DNA
tagttgggaaggagaattcatctt

SEQ ID NO: 9941 - DNA, 24 bp, synthetic construct
  misc_feature 1..24: note = Synthetic
  source 1..24: mol_type = other DNA
tttagtatggaatgaggtccttac

SEQ ID NO: 9942 - DNA, 24 bp, synthetic construct
  misc_feature 1..24: note = Synthetic
  source 1..24: mol_type = other DNA
aataactactcttgactcaccggc

SEQ ID NO: 9943 - DNA, 24 bp, synthetic construct
  misc_feature 1..24: note = Synthetic
  source 1..24: mol_type = other DNA
gcgccctgtgtgcgccgtgcacaa

SEQ ID NO: 9944 - DNA, 24 bp, synthetic construct
  misc_feature 1..24: note = Synthetic
  source 1..24: mol_type = other DNA
cccatgcgcgccgccttcagtaga

SEQ ID NO: 9945 - DNA, 24 bp, synthetic construct
  misc_feature 1..24: note = Synthetic
  source 1..24: mol_type = other DNA
tgcatatcacccactacaaacgag

SEQ ID NO: 9946 - DNA, 24 bp, synthetic construct
  misc_feature 1..24: note = Synthetic
  source 1..24: mol_type = other DNA
tcccgcagaaactcagttacgctt

SEQ ID NO: 9947 - DNA, 24 bp, synthetic construct
  misc_feature 1..24: note = Synthetic
  source 1..24: mol_type = other DNA
agggcactatcacgggaagacact

SEQ ID NO: 9948 - DNA, 24 bp, synthetic construct
  misc_feature 1..24: note = Synthetic
  source 1..24: mol_type = other DNA
caccactatttagcctgggaccac

SEQ ID NO: 9949 - DNA, 24 bp, synthetic construct
  misc_feature 1..24: note = Synthetic
  source 1..24: mol_type = other DNA
aatctgtatgcgctctgtacttac

SEQ ID NO: 9950 - DNA, 24 bp, synthetic construct
  misc_feature 1..24: note = Synthetic
  source 1..24: mol_type = other DNA
tgacctgacctaatagataagcac

SEQ ID NO: 9951 - DNA, 24 bp, synthetic construct
  misc_feature 1..24: note = Synthetic
  source 1..24: mol_type = other DNA
tcgttctactagggtgacctggtt

SEQ ID NO: 9952 - DNA, 24 bp, synthetic construct
  misc_feature 1..24: note = Synthetic
  source 1..24: mol_type = other DNA
ctaaggacggtacggagtcgttat

SEQ ID NO: 9953 - DNA, 24 bp, synthetic construct
  misc_feature 1..24: note = Synthetic
  source 1..24: mol_type = other DNA
tctgaactgacgtagcagaggttc

SEQ ID NO: 9954 - DNA, 24 bp, synthetic construct
  misc_feature 1..24: note = Synthetic
  source 1..24: mol_type = other DNA
tgtacgtgcaatacgaaaggaatc

SEQ ID NO: 9955 - DNA, 24 bp, synthetic construct
  misc_feature 1..24: note = Synthetic
  source 1..24: mol_type = other DNA
cgttcccgtaagaatgacaacaag

SEQ ID NO: 9956 - DNA, 24 bp, synthetic construct
  misc_feature 1..24: note = Synthetic
  source 1..24: mol_type = other DNA
ctcgtaaccacagcgagcttatat

SEQ ID NO: 9957 - DNA, 24 bp, synthetic construct
  misc_feature 1..24: note = Synthetic
  source 1..24: mol_type = other DNA
ccgaaagccaatgaagctttaggt

SEQ ID NO: 9958 - DNA, 24 bp, synthetic construct
  misc_feature 1..24: note = Synthetic
  source 1..24: mol_type = other DNA
atatggagtgaagtttagctcaat

SEQ ID NO: 9959 - DNA, 24 bp, synthetic construct
  misc_feature 1..24: note = Synthetic
  source 1..24: mol_type = other DNA
atgtcgattgttcataacagatcg

SEQ ID NO: 9960 - DNA, 24 bp, synthetic construct
  misc_feature 1..24: note = Synthetic
  source 1..24: mol_type = other DNA
tttgagactcatattggattaatt

SEQ ID NO: 9961 - DNA, 24 bp, synthetic construct
  misc_feature 1..24: note = Synthetic
  source 1..24: mol_type = other DNA
agccggcacgacactcctggaggc

SEQ ID NO: 9962 - DNA, 24 bp, synthetic construct
  misc_feature 1..24: note = Synthetic
  source 1..24: mol_type = other DNA
gcacgtatacgataacactgccga

SEQ ID NO: 9963 - DNA, 24 bp, synthetic construct
  misc_feature 1..24: note = Synthetic
  source 1..24: mol_type = other DNA
ttgggtaccgggttctatgctccg

SEQ ID NO: 9964 - DNA, 24 bp, synthetic construct
  misc_feature 1..24: note = Synthetic
  source 1..24: mol_type = other DNA
atttgatcattaagttccctcgac

SEQ ID NO: 9965 - DNA, 24 bp, synthetic construct
  misc_feature 1..24: note = Synthetic
  source 1..24: mol_type = other DNA
tccatccctaggccttgaacaaag

SEQ ID NO: 9966 - DNA, 24 bp, synthetic construct
  misc_feature 1..24: note = Synthetic
  source 1..24: mol_type = other DNA
taaggtgtagtcttaacgtaacgg

SEQ ID NO: 9967 - DNA, 24 bp, synthetic construct
  misc_feature 1..24: note = Synthetic
  source 1..24: mol_type = other DNA
ggccaataacaaccacagaagtcc

SEQ ID NO: 9968 - DNA, 24 bp, synthetic construct
  misc_feature 1..24: note = Synthetic
  source 1..24: mol_type = other DNA
taccggctaattcctcaagtcgtt

SEQ ID NO: 9969 - DNA, 24 bp, synthetic construct
  misc_feature 1..24: note = Synthetic
  source 1..24: mol_type = other DNA
attggatatgcacccgcctttgct

SEQ ID NO: 9970 - DNA, 24 bp, synthetic construct
  misc_feature 1..24: note = Synthetic
  source 1..24: mol_type = other DNA
gctagtacccgagtctatggatga

SEQ ID NO: 9971 - DNA, 24 bp, synthetic construct
  misc_feature 1..24: note = Synthetic
  source 1..24: mol_type = other DNA
aacctagcttgctacccagcgtcg

SEQ ID NO: 9972 - DNA, 24 bp, synthetic construct
  misc_feature 1..24: note = Synthetic
  source 1..24: mol_type = other DNA
ccggtactgtagcacaacagttgg

SEQ ID NO: 9973 - DNA, 24 bp, synthetic construct
  misc_feature 1..24: note = Synthetic
  source 1..24: mol_type = other DNA
gagctacaatttgatgttcattac

SEQ ID NO: 9974 - DNA, 24 bp, synthetic construct
  misc_feature 1..24: note = Synthetic
  source 1..24: mol_type = other DNA
aaactataattagaacggaagtaa

SEQ ID NO: 9975 - DNA, 24 bp, synthetic construct
  misc_feature 1..24: note = Synthetic
  source 1..24: mol_type = other DNA
aagactcctcacggagtcgactta

SEQ ID NO: 9976 - DNA, 24 bp, synthetic construct
  misc_feature 1..24: note = Synthetic
  source 1..24: mol_type = other DNA
aaggagctagtgccttcgtgttag

SEQ ID NO: 9977 - DNA, 24 bp, synthetic construct
  misc_feature 1..24: note = Synthetic
  source 1..24: mol_type = other DNA
cgttgactcccaaacgcacgggtg

SEQ ID NO: 9978 - DNA, 24 bp, synthetic construct
  misc_feature 1..24: note = Synthetic
  source 1..24: mol_type = other DNA
gcgcttaggaaccatacaatacta

SEQ ID NO: 9979 - DNA, 24 bp, synthetic construct
  misc_feature 1..24: note = Synthetic
  source 1..24: mol_type = other DNA
tggttggaatcaggaacggttaga

SEQ ID NO: 9980 - DNA, 24 bp, synthetic construct
  misc_feature 1..24: note = Synthetic
  source 1..24: mol_type = other DNA
tggtcggcgtgagtccaacgtata

SEQ ID NO: 9981 - DNA, 24 bp, synthetic construct
  misc_feature 1..24: note = Synthetic
  source 1..24: mol_type = other DNA
gtccgcatcggacggtgttctact

SEQ ID NO: 9982 - DNA, 24 bp, synthetic construct
  misc_feature 1..24: note = Synthetic
  source 1..24: mol_type = other DNA
atgctgcgtttgccgtatatcggc

SEQ ID NO: 9983 - DNA, 24 bp, synthetic construct
  misc_feature 1..24: note = Synthetic
  source 1..24: mol_type = other DNA
gatataaagagacggacttacgga

SEQ ID NO: 9984 - DNA, 24 bp, synthetic construct
  misc_feature 1..24: note = Synthetic
  source 1..24: mol_type = other DNA
actgttaccgggtccgggagctgt

SEQ ID NO: 9985 - DNA, 24 bp, synthetic construct
  misc_feature 1..24: note = Synthetic
  source 1..24: mol_type = other DNA
cgtagaccacatccgcaataccgc

SEQ ID NO: 9986 - DNA, 24 bp, synthetic construct
  misc_feature 1..24: note = Synthetic
  source 1..24: mol_type = other DNA
atgtacatcttaccagatctccct

SEQ ID NO: 9987 - DNA, 24 bp, synthetic construct
  misc_feature 1..24: note = Synthetic
  source 1..24: mol_type = other DNA
ggtagccagaacgttcatttacga

SEQ ID NO: 9988 - DNA, 24 bp, synthetic construct
  misc_feature 1..24: note = Synthetic
  source 1..24: mol_type = other DNA
ggtccgtagaaatcctggtgcaaa

SEQ ID NO: 9989 - DNA, 24 bp, synthetic construct
  misc_feature 1..24: note = Synthetic
  source 1..24: mol_type = other DNA
gactgcgcagcggatctgcactaa

SEQ ID NO: 9990 - DNA, 24 bp, synthetic construct
  misc_feature 1..24: note = Synthetic
  source 1..24: mol_type = other DNA
agatgatcaccctggattagcgtt

SEQ ID NO: 9991 - DNA, 24 bp, synthetic construct
  misc_feature 1..24: note = Synthetic
  source 1..24: mol_type = other DNA
tgcttccgttgctttctgtgcact

SEQ ID NO: 9992 - DNA, 24 bp, synthetic construct
  misc_feature 1..24: note = Synthetic
  source 1..24: mol_type = other DNA
cattagtcgcgattcttgtggcca

SEQ ID NO: 9993 - DNA, 24 bp, synthetic construct
  misc_feature 1..24: note = Synthetic
  source 1..24: mol_type = other DNA
agcctcaagccattcggttagctc

SEQ ID NO: 9994 - DNA, 24 bp, synthetic construct
  misc_feature 1..24: note = Synthetic
  source 1..24: mol_type = other DNA
tcgagtcatccgctaaatctactc

SEQ ID NO: 9995 - DNA, 24 bp, synthetic construct
  misc_feature 1..24: note = Synthetic
  source 1..24: mol_type = other DNA
tattggagtcagtgagccattcac

SEQ ID NO: 9996 - DNA, 24 bp, synthetic construct
  misc_feature 1..24: note = Synthetic
  source 1..24: mol_type = other DNA
atataaccaggtgcggcgtcgacc

SEQ ID NO: 9997 - DNA, 24 bp, synthetic construct
  misc_feature 1..24: note = Synthetic
  source 1..24: mol_type = other DNA
ttaggacttgctacatgggcacat

SEQ ID NO: 9998 - DNA, 24 bp, synthetic construct
  misc_feature 1..24: note = Synthetic
  source 1..24: mol_type = other DNA
gatagtaactaacgtgaacttcct

SEQ ID NO: 9999 - DNA, 24 bp, synthetic construct
  misc_feature 1..24: note = Synthetic
  source 1..24: mol_type = other DNA
atttcgtccctcctatggcggaac

SEQ ID NO: 10000 - DNA, 24 bp, synthetic construct
  misc_feature 1..24: note = Synthetic
  source 1..24: mol_type = other DNA
cgaaatgctcactcactgagtact

SEQ ID NO: 10001 - DNA, 24 bp, synthetic construct
  misc_feature 1..24: note = Synthetic
  source 1..24: mol_type = other DNA
tctcgataacaatattctatggga

SEQ ID NO: 10002 - DNA, 24 bp, synthetic construct
  misc_feature 1..24: note = Synthetic
  source 1..24: mol_type = other DNA
gtctcgcatagttatgtattcttc

SEQ ID NO: 10003 - DNA, 24 bp, synthetic construct
  misc_feature 1..24: note = Synthetic
  source 1..24: mol_type = other DNA
tagcagatcgtaatcatggtgacc

SEQ ID NO: 10004 - DNA, 24 bp, synthetic construct
  misc_feature 1..24: note = Synthetic
  source 1..24: mol_type = other DNA
taatgtatactttaagtccacaac

SEQ ID NO: 10005 - DNA, 24 bp, synthetic construct
  misc_feature 1..24: note = Synthetic
  source 1..24: mol_type = other DNA
tatcaagcgtagacataccatttc

SEQ ID NO: 10006 - DNA, 24 bp, synthetic construct
  misc_feature 1..24: note = Synthetic
  source 1..24: mol_type = other DNA
aataggctgccgtctttcagtagt

SEQ ID NO: 10007 - DNA, 24 bp, synthetic construct
  misc_feature 1..24: note = Synthetic
  source 1..24: mol_type = other DNA
agtgatgggcagtcattacaatac

SEQ ID NO: 10008 - DNA, 24 bp, synthetic construct
  misc_feature 1..24: note = Synthetic
  source 1..24: mol_type = other DNA
ccttgcaacctagggaataacaaa

SEQ ID NO: 10009 - DNA, 24 bp, synthetic construct
  misc_feature 1..24: note = Synthetic
  source 1..24: mol_type = other DNA
catccttctgaatgtcagatttaa

SEQ ID NO: 10010 - DNA, 24 bp, synthetic construct
  misc_feature 1..24: note = Synthetic
  source 1..24: mol_type = other DNA
aatcagagtcgccctaacagcagc

SEQ ID NO: 10011 - DNA, 24 bp, synthetic construct
  misc_feature 1..24: note = Synthetic
  source 1..24: mol_type = other DNA
agaagttcctaatttctgtgagta

SEQ ID NO: 10012 - DNA, 24 bp, synthetic construct
  misc_feature 1..24: note = Synthetic
  source 1..24: mol_type = other DNA
agtatgccgcgtcttaccaccgcg

SEQ ID NO: 10013 - DNA, 24 bp, synthetic construct
  misc_feature 1..24: note = Synthetic
  source 1..24: mol_type = other DNA
actgcactcggagttagtgatcat

SEQ ID NO: 10014 - DNA, 24 bp, synthetic construct
  misc_feature 1..24: note = Synthetic
  source 1..24: mol_type = other DNA
accatactcacgaaactccagatg

SEQ ID NO: 10015 - DNA, 24 bp, synthetic construct
  misc_feature 1..24: note = Synthetic
  source 1..24: mol_type = other DNA
taagaccgggcgatcgacgacttc

SEQ ID NO: 10016 - DNA, 24 bp, synthetic construct
  misc_feature 1..24: note = Synthetic
  source 1..24: mol_type = other DNA
cggagtatccttccatgacactct

SEQ ID NO: 10017 - DNA, 24 bp, synthetic construct
  misc_feature 1..24: note = Synthetic
  source 1..24: mol_type = other DNA
taaagaactgttaagcctcgcgac

SEQ ID NO: 10018 - DNA, 24 bp, synthetic construct
  misc_feature 1..24: note = Synthetic
  source 1..24: mol_type = other DNA
ggttacaacgagtcattggcggca

SEQ ID NO: 10019 - DNA, 24 bp, synthetic construct
  misc_feature 1..24: note = Synthetic
  source 1..24: mol_type = other DNA
ctttagtgaatgtaaggtgagtgc

SEQ ID NO: 10020 - DNA, 24 bp, synthetic construct
  misc_feature 1..24: note = Synthetic
  source 1..24: mol_type = other DNA
atatacgcctaccggtaggaacca

SEQ ID NO: 10021 - DNA, 24 bp, synthetic construct
  misc_feature 1..24: note = Synthetic
  source 1..24: mol_type = other DNA
agatcactgtgtcatgtcgttaac

SEQ ID NO: 10022 - DNA, 24 bp, synthetic construct
  misc_feature 1..24: note = Synthetic
  source 1..24: mol_type = other DNA
ggttatcagaaccgtactatcgtc

SEQ ID NO: 10023 - DNA, 24 bp, synthetic construct
  misc_feature 1..24: note = Synthetic
  source 1..24: mol_type = other DNA
cagcttccgccttccaataatcat

SEQ ID NO: 10024 - DNA, 24 bp, synthetic construct
  misc_feature 1..24: note = Synthetic
  source 1..24: mol_type = other DNA
ggacgcatgcctgatgtcggcggt

SEQ ID NO: 10025 - DNA, 24 bp, synthetic construct
  misc_feature 1..24: note = Synthetic
  source 1..24: mol_type = other DNA
tctctttcacctctagtgtgtttg

SEQ ID NO: 10026 - DNA, 24 bp, synthetic construct
  misc_feature 1..24: note = Synthetic
  source 1..24: mol_type = other DNA
tcgccctctttgtactgttgatgc

SEQ ID NO: 10027 - DNA, 24 bp, synthetic construct
  misc_feature 1..24: note = Synthetic
  source 1..24: mol_type = other DNA
agaagcggactaggagcgtcggat

SEQ ID NO: 10028 - DNA, 24 bp, synthetic construct
  misc_feature 1..24: note = Synthetic
  source 1..24: mol_type = other DNA
agacgttgtggaaatgaagctcgc

SEQ ID NO: 10029 - DNA, 24 bp, synthetic construct
  misc_feature 1..24: note = Synthetic
  source 1..24: mol_type = other DNA
taattcgctcttaagtctcggaca

SEQ ID NO: 10030 - DNA, 24 bp, synthetic construct
  misc_feature 1..24: note = Synthetic
  source 1..24: mol_type = other DNA
atctcaatcgagctgtccgttctc

SEQ ID NO: 10031 - DNA, 24 bp, synthetic construct
  misc_feature 1..24: note = Synthetic
  source 1..24: mol_type = other DNA
gctgcaatgtacggcggataagcc

SEQ ID NO: 10032 - DNA, 24 bp, synthetic construct
  misc_feature 1..24: note = Synthetic
  source 1..24: mol_type = other DNA
cgttgacgatcatcgaacgtctga

SEQ ID NO: 10033 - DNA, 24 bp, synthetic construct
  misc_feature 1..24: note = Synthetic
  source 1..24: mol_type = other DNA
gcctgacatgggcgcaccgagaat

SEQ ID NO: 10034 - DNA, 24 bp, synthetic construct
  misc_feature 1..24: note = Synthetic
  source 1..24: mol_type = other DNA
aacagactagaggccgacattggg

SEQ ID NO: 10035 - DNA, 24 bp, synthetic construct
  misc_feature 1..24: note = Synthetic
  source 1..24: mol_type = other DNA
ctagcgtgaagtgctggcagctgc

SEQ ID NO: 10036 - DNA, 24 bp, synthetic construct
  misc_feature 1..24: note = Synthetic
  source 1..24: mol_type = other DNA
ggcctcccgtaaacgataaagacc

SEQ ID NO: 10037 - DNA, 24 bp, synthetic construct
  misc_feature 1..24: note = Synthetic
  source 1..24: mol_type = other DNA
acttagacgaaagacatatccatc

SEQ ID NO: 10038 - DNA, 24 bp, synthetic construct
  misc_feature 1..24: note = Synthetic
  source 1..24: mol_type = other DNA
cctgaacggccagcgacatgatgc

SEQ ID NO: 10039 - DNA, 24 bp, synthetic construct
  misc_feature 1..24: note = Synthetic
  source 1..24: mol_type = other DNA
acttacctgccacttaatatgaga

SEQ ID NO: 10040 - DNA, 24 bp, synthetic construct
  misc_feature 1..24: note = Synthetic
  source 1..24: mol_type = other DNA
tgacactacgagatttcaacggtc

SEQ ID NO: 10041 - DNA, 24 bp, synthetic construct
  misc_feature 1..24: note = Synthetic
  source 1..24: mol_type = other DNA
ggaaccctcaacaaggagtcgccg

SEQ ID NO: 10042 - DNA, 24 bp, synthetic construct
  misc_feature 1..24: note = Synthetic
  source 1..24: mol_type = other DNA
atacgttgcccacagaaactcaac

SEQ ID NO: 10043 - DNA, 24 bp, synthetic construct
  misc_feature 1..24: note = Synthetic
  source 1..24: mol_type = other DNA
caagtgatatccaccttggatgcc

SEQ ID NO: 10044 - DNA, 24 bp, synthetic construct
  misc_feature 1..24: note = Synthetic
  source 1..24: mol_type = other DNA
tcctgaataaatacaattcctgct

SEQ ID NO: 10045 - DNA, 24 bp, synthetic construct
  misc_feature 1..24: note = Synthetic
  source 1..24: mol_type = other DNA
aaccatataacgcccggtacttat

SEQ ID NO: 10046 - DNA, 24 bp, synthetic construct
  misc_feature 1..24: note = Synthetic
  source 1..24: mol_type = other DNA
gatttcctaaagagttcaagccgt

SEQ ID NO: 10047 - DNA, 24 bp, synthetic construct
  misc_feature 1..24: note = Synthetic
  source 1..24: mol_type = other DNA
cgagccctgtctgcaagaaattta

SEQ ID NO: 10048 - DNA, 24 bp, synthetic construct
  misc_feature 1..24: note = Synthetic
  source 1..24: mol_type = other DNA
gaagaggtcagcgcgtatgacatc

SEQ ID NO: 10049 - DNA, 24 bp, synthetic construct
  misc_feature 1..24: note = Synthetic
  source 1..24: mol_type = other DNA
cggccttgaggctcccggtccgat

SEQ ID NO: 10050 - DNA, 24 bp, synthetic construct
  misc_feature 1..24: note = Synthetic
  source 1..24: mol_type = other DNA
gtacacgactaccggagacacgac

SEQ ID NO: 10051 - DNA, 24 bp, synthetic construct
  misc_feature 1..24: note = Synthetic
  source 1..24: mol_type = other DNA
tcggaacttggctatcctgcttct

SEQ ID NO: 10052 - DNA, 24 bp, synthetic construct
  misc_feature 1..24: note = Synthetic
  source 1..24: mol_type = other DNA
atattactattgatcgacatacac

SEQ ID NO: 10053 - DNA, 24 bp, synthetic construct
  misc_feature 1..24: note = Synthetic
  source 1..24: mol_type = other DNA
gttctgccagccagtctcactccc

SEQ ID NO: 10054 - DNA, 24 bp, synthetic construct
  misc_feature 1..24: note = Synthetic
  source 1..24: mol_type = other DNA
ttatagctgggagacaaaccaata

SEQ ID NO: 10055 - DNA, 24 bp, synthetic construct
  misc_feature 1..24: note = Synthetic
  source 1..24: mol_type = other DNA
taaagatcatgtcgtgatatgctt

SEQ ID NO: 10056 - DNA, 24 bp, synthetic construct
  misc_feature 1..24: note = Synthetic
  source 1..24: mol_type = other DNA
gcgaaatgaggcatacgcgtgcat

SEQ ID NO: 10057 - DNA, 24 bp, synthetic construct
  misc_feature 1..24: note = Synthetic
  source 1..24: mol_type = other DNA
tttgtgcgtgttacaggcgggctc

SEQ ID NO: 10058 - DNA, 24 bp, synthetic construct
  misc_feature 1..24: note = Synthetic
  source 1..24: mol_type = other DNA
ccaccgtgttgcctagatatagtt

SEQ ID NO: 10059 - DNA, 24 bp, synthetic construct
  misc_feature 1..24: note = Synthetic
  source 1..24: mol_type = other DNA
atcctttccgagatccgctcgggt

SEQ ID NO: 10060 - DNA, 24 bp, synthetic construct
  misc_feature 1..24: note = Synthetic
  source 1..24: mol_type = other DNA
gtagaaggcttcgcttaaggaagg

SEQ ID NO: 10061 - DNA, 24 bp, synthetic construct
  misc_feature 1..24: note = Synthetic
  source 1..24: mol_type = other DNA
gagaccgcgcattcttacctgaat

SEQ ID NO: 10062 - DNA, 24 bp, synthetic construct
  misc_feature 1..24: note = Synthetic
  source 1..24: mol_type = other DNA
gcttctgtaattcatgttcagaag

SEQ ID NO: 10063 - DNA, 24 bp, synthetic construct
  misc_feature 1..24: note = Synthetic
  source 1..24: mol_type = other DNA
catatgtatatgacatcacattct

SEQ ID NO: 10064 - DNA, 24 bp, synthetic construct
  misc_feature 1..24: note = Synthetic
  source 1..24: mol_type = other DNA
gaaggttggtgctccagcgggtgc

SEQ ID NO: 10065 - DNA, 24 bp, synthetic construct
  misc_feature 1..24: note = Synthetic
  source 1..24: mol_type = other DNA
ctaacagaatggctggccaactta

SEQ ID NO: 10066 - DNA, 24 bp, synthetic construct
  misc_feature 1..24: note = Synthetic
  source 1..24: mol_type = other DNA
tcataccataccaatctccgaaag

SEQ ID NO: 10067 - DNA, 24 bp, synthetic construct
  misc_feature 1..24: note = Synthetic
  source 1..24: mol_type = other DNA
gactctggcgccagagcttcacgt

SEQ ID NO: 10068 - DNA, 24 bp, synthetic construct
  misc_feature 1..24: note = Synthetic
  source 1..24: mol_type = other DNA
aggataggatttcagtggatccaa

SEQ ID NO: 10069 - DNA, 24 bp, synthetic construct
  misc_feature 1..24: note = Synthetic
  source 1..24: mol_type = other DNA
attgagcacgcctatgtggcgaga

SEQ ID NO: 10070 - DNA, 24 bp, synthetic construct
  misc_feature 1..24: note = Synthetic
  source 1..24: mol_type = other DNA
gcaagccctcaaccgcaactttct

SEQ ID NO: 10071 - DNA, 24 bp, synthetic construct
  misc_feature 1..24: note = Synthetic
  source 1..24: mol_type = other DNA
agcttaggaaagccaagttaacaa

SEQ ID NO: 10072 - DNA, 24 bp, synthetic construct
  misc_feature 1..24: note = Synthetic
  source 1..24: mol_type = other DNA
atatcgacgagcgttgattctttc

SEQ ID NO: 10073 - DNA, 24 bp, synthetic construct
  misc_feature 1..24: note = Synthetic
  source 1..24: mol_type = other DNA
tatcatctggctcgggtcatttaa

SEQ ID NO: 10074 - DNA, 24 bp, synthetic construct
  misc_feature 1..24: note = Synthetic
  source 1..24: mol_type = other DNA
acgcgcgtaccacacaaacatcta

SEQ ID NO: 10075 - DNA, 24 bp, synthetic construct
  misc_feature 1..24: note = Synthetic
  source 1..24: mol_type = other DNA
ttagtctttgtactcaccttggcg

SEQ ID NO: 10076 - DNA, 24 bp, synthetic construct
  misc_feature 1..24: note = Synthetic
  source 1..24: mol_type = other DNA
cacaattgccataatcggaactgt

SEQ ID NO: 10077 - DNA, 24 bp, synthetic construct
  misc_feature 1..24: note = Synthetic
  source 1..24: mol_type = other DNA
agataataaacccgaacgcctagg

SEQ ID NO: 10078 - DNA, 24 bp, synthetic construct
  misc_feature 1..24: note = Synthetic
  source 1..24: mol_type = other DNA
tccagtgtgttatgtttcacgact

SEQ ID NO: 10079 - DNA, 24 bp, synthetic construct
  misc_feature 1..24: note = Synthetic
  source 1..24: mol_type = other DNA
cttaagggtgcggctgtattccca

SEQ ID NO: 10080 - DNA, 24 bp, synthetic construct
  misc_feature 1..24: note = Synthetic
  source 1..24: mol_type = other DNA
gtgaaataccggcaggttgcaacg

SEQ ID NO: 10081 - DNA, 24 bp, synthetic construct
  misc_feature 1..24: note = Synthetic
  source 1..24: mol_type = other DNA
taccgctgtttgttgggcgatctt

SEQ ID NO: 10082 - DNA, 24 bp, synthetic construct
  misc_feature 1..24: note = Synthetic
  source 1..24: mol_type = other DNA
gcccactctgtgagcgtttatggg

SEQ ID NO: 10083 - DNA, 24 bp, synthetic construct
  misc_feature 1..24: note = Synthetic
  source 1..24: mol_type = other DNA
ttgcgaaatgagccgacaacagag

SEQ ID NO: 10084 - DNA, 24 bp, synthetic construct
  misc_feature 1..24: note = Synthetic
  source 1..24: mol_type = other DNA
tttccaaggagcgcgccaacggtg

SEQ ID NO: 10085 - DNA, 24 bp, synthetic construct
  misc_feature 1..24: note = Synthetic
  source 1..24: mol_type = other DNA
cgatattccaactgcgaaagtcga

SEQ ID NO: 10086 - DNA, 24 bp, synthetic construct
  misc_feature 1..24: note = Synthetic
  source 1..24: mol_type = other DNA
tctatacctgcttggcgccaacac

SEQ ID NO: 10087 - DNA, 24 bp, synthetic construct
  misc_feature 1..24: note = Synthetic
  source 1..24: mol_type = other DNA
aaagatgaggaatccgctcacgaa

SEQ ID NO: 10088 - DNA, 24 bp, synthetic construct
  misc_feature 1..24: note = Synthetic
  source 1..24: mol_type = other DNA
gaagtgcatgaactgagcggtgtt

SEQ ID NO: 10089 - DNA, 24 bp, synthetic construct
  misc_feature 1..24: note = Synthetic
  source 1..24: mol_type = other DNA
gtcttgcaggtcttgaagtgggac

SEQ ID NO: 10090 - DNA, 24 bp, synthetic construct
  misc_feature 1..24: note = Synthetic
  source 1..24: mol_type = other DNA
tcaaaggctcaacacctgataggt

SEQ ID NO: 10091 - DNA, 24 bp, synthetic construct
  misc_feature 1..24: note = Synthetic
  source 1..24: mol_type = other DNA
cacaaggttagattatagctgcat

SEQ ID NO: 10092 - DNA, 24 bp, synthetic construct
  misc_feature 1..24: note = Synthetic
  source 1..24: mol_type = other DNA
atctattgtgactaagccaactta

SEQ ID NO: 10093 - DNA, 24 bp, synthetic construct
  misc_feature 1..24: note = Synthetic
  source 1..24: mol_type = other DNA
tatagacagtcccgcctttcaatg

SEQ ID NO: 10094 - DNA, 24 bp, synthetic construct
  misc_feature 1..24: note = Synthetic
  source 1..24: mol_type = other DNA
ggcttatagtcgtaggcgggtgcc

SEQ ID NO: 10095 - DNA, 24 bp, synthetic construct
  misc_feature 1..24: note = Synthetic
  source 1..24: mol_type = other DNA
cgttactaccgatgttctattggc

SEQ ID NO: 10096 - DNA, 24 bp, synthetic construct
  misc_feature 1..24: note = Synthetic
  source 1..24: mol_type = other DNA
gtgcccgatgtgagatccactggc

SEQ ID NO: 10097 - DNA, 24 bp, synthetic construct
  misc_feature 1..24: note = Synthetic
  source 1..24: mol_type = other DNA
ttccgtggatcgcacgggcaatta

SEQ ID NO: 10098 - DNA, 24 bp, synthetic construct
  misc_feature 1..24: note = Synthetic
  source 1..24: mol_type = other DNA
gttcaaagatcagagtaattgtag

SEQ ID NO: 10099 - DNA, 24 bp, synthetic construct
  misc_feature 1..24: note = Synthetic
  source 1..24: mol_type = other DNA
attggattgatgatactctctatt

SEQ ID NO: 10100 - DNA, 24 bp, synthetic construct
  misc_feature 1..24: note = Synthetic
  source 1..24: mol_type = other DNA
accgtacactatgtaacggatatg

SEQ ID NO: 10101 - DNA, 24 bp, synthetic construct
  misc_feature 1..24: note = Synthetic
  source 1..24: mol_type = other DNA
gcacatctgaattacacagccgtt

SEQ ID NO: 10102 - DNA, 24 bp, synthetic construct
  misc_feature 1..24: note = Synthetic
  source 1..24: mol_type = other DNA
gattaccggaaatgaaatttgcgg

SEQ ID NO: 10103 - DNA, 24 bp, synthetic construct
  misc_feature 1..24: note = Synthetic
  source 1..24: mol_type = other DNA
aaatataggtcccgcataattacg

SEQ ID NO: 10104 - DNA, 24 bp, synthetic construct
  misc_feature 1..24: note = Synthetic
  source 1..24: mol_type = other DNA
cgagcctagtacctgtatacaata

SEQ ID NO: 10105 - DNA, 24 bp, synthetic construct
  misc_feature 1..24: note = Synthetic
  source 1..24: mol_type = other DNA
cacacaatgcgctaaagcggccaa

SEQ ID NO: 10106 - DNA, 24 bp, synthetic construct
  misc_feature 1..24: note = Synthetic
  source 1..24: mol_type = other DNA
ggtaggcttactgccgccaacaca

SEQ ID NO: 10107 - DNA, 24 bp, synthetic construct
  misc_feature 1..24: note = Synthetic
  source 1..24: mol_type = other DNA
tccctcgcgcgattgtcaaccgcc

SEQ ID NO: 10108 - DNA, 24 bp, synthetic construct
  misc_feature 1..24: note = Synthetic
  source 1..24: mol_type = other DNA
agttcaaggactttcctagtggcc

SEQ ID NO: 10109 - DNA, 24 bp, synthetic construct
  misc_feature 1..24: note = Synthetic
  source 1..24: mol_type = other DNA
gtcttgcccgccacatcagcgctt

SEQ ID NO: 10110 - DNA, 24 bp, synthetic construct
  misc_feature 1..24: note = Synthetic
  source 1..24: mol_type = other DNA
gcacttaccgtatgcagggcggga

SEQ ID NO: 10111 - DNA, 24 bp, synthetic construct
  misc_feature 1..24: note = Synthetic
  source 1..24: mol_type = other DNA
cagatcagcgtgcacatgcatatc

SEQ ID NO: 10112 - DNA, 24 bp, synthetic construct
  misc_feature 1..24: note = Synthetic
  source 1..24: mol_type = other DNA
ctaaagcgggacgctaagttacgg

SEQ ID NO: 10113 - DNA, 24 bp, synthetic construct
  misc_feature 1..24: note = Synthetic
  source 1..24: mol_type = other DNA
acactataacctcccttagaaacg

SEQ ID NO: 10114 - DNA, 24 bp, synthetic construct
  misc_feature 1..24: note = Synthetic
  source 1..24: mol_type = other DNA
tcagctatgacatgatgacaggga

SEQ ID NO: 10115 - DNA, 24 bp, synthetic construct
  misc_feature 1..24: note = Synthetic
  source 1..24: mol_type = other DNA
agaagttagattacgttcgggaat

SEQ ID NO: 10116 - DNA, 24 bp, synthetic construct
  misc_feature 1..24: note = Synthetic
  source 1..24: mol_type = other DNA
gacgatccgcaagtgacactaccg

SEQ ID NO: 10117 - DNA, 24 bp, synthetic construct
  misc_feature 1..24: note = Synthetic
  source 1..24: mol_type = other DNA
ccaatttatagtgttattgcctag

SEQ ID NO: 10118 - DNA, 24 bp, synthetic construct
  misc_feature 1..24: note = Synthetic
  source 1..24: mol_type = other DNA
aatcgattcccaaacgccgcaagt

SEQ ID NO: 10119 - DNA, 24 bp, synthetic construct
  misc_feature 1..24: note = Synthetic
  source 1..24: mol_type = other DNA
cgtactctgtcaggacaaagggtt

SEQ ID NO: 10120 - DNA, 24 bp, synthetic construct
  misc_feature 1..24: note = Synthetic
  source 1..24: mol_type = other DNA
aggccctccgcgtgcagaaccaag

SEQ ID NO: 10121 - DNA, 24 bp, synthetic construct
  misc_feature 1..24: note = Synthetic
  source 1..24: mol_type = other DNA
cccaagctattcgcccatctaacg

SEQ ID NO: 10122 - DNA, 24 bp, synthetic construct
  misc_feature 1..24: note = Synthetic
  source 1..24: mol_type = other DNA
gaggaaggtatgtctcaagagcct

SEQ ID NO: 10123 - DNA, 24 bp, synthetic construct
  misc_feature 1..24: note = Synthetic
  source 1..24: mol_type = other DNA
aatctataacataaaaagtgtctc

SEQ ID NO: 10124 - DNA, 24 bp, synthetic construct
  misc_feature 1..24: note = Synthetic
  source 1..24: mol_type = other DNA
tgcgcacgatattatttttacctt

SEQ ID NO: 10125 - DNA, 24 bp, synthetic construct
  misc_feature 1..24: note = Synthetic
  source 1..24: mol_type = other DNA
gacagataataccattgtccccgt

SEQ ID NO: 10126 - DNA, 24 bp, synthetic construct
  misc_feature 1..24: note = Synthetic
  source 1..24: mol_type = other DNA
attgtcaatggtttgatctcagca

SEQ ID NO: 10127 - DNA, 24 bp, synthetic construct
  misc_feature 1..24: note = Synthetic
  source 1..24: mol_type = other DNA
ggaccgaagataatctcaccttat

SEQ ID NO: 10128 - DNA, 24 bp, synthetic construct
  misc_feature 1..24: note = Synthetic
  source 1..24: mol_type = other DNA
tagagctaccaggtatcccgcgcg

SEQ ID NO: 10129 - DNA, 24 bp, synthetic construct
  misc_feature 1..24: note = Synthetic
  source 1..24: mol_type = other DNA
atacacataaggattattcccccg

SEQ ID NO: 10130 - DNA, 24 bp, synthetic construct
  misc_feature 1..24: note = Synthetic
  source 1..24: mol_type = other DNA
tgacccaggtaacataaacgcctc

SEQ ID NO: 10131 - DNA, 24 bp, synthetic construct
  misc_feature 1..24: note = Synthetic
  source 1..24: mol_type = other DNA
ttaatgtaccagcgcatcaatggc

SEQ ID NO: 10132 - DNA, 24 bp, synthetic construct
  misc_feature 1..24: note = Synthetic
  source 1..24: mol_type = other DNA
gtctcaaagcgcgttagtgaggaa

SEQ ID NO: 10133 - DNA, 24 bp, synthetic construct
  misc_feature 1..24: note = Synthetic
  source 1..24: mol_type = other DNA
actagtaatctgcaacaaaaacct

SEQ ID NO: 10134 - DNA, 24 bp, synthetic construct
  misc_feature 1..24: note = Synthetic
  source 1..24: mol_type = other DNA
gtgcttggtgtgtatattggtgta

SEQ ID NO: 10135 - DNA, 24 bp, synthetic construct
  misc_feature 1..24: note = Synthetic
  source 1..24: mol_type = other DNA
taacgccaatgctcggggcccgga

SEQ ID NO: 10136 - DNA, 24 bp, synthetic construct
  misc_feature 1..24: note = Synthetic
  source 1..24: mol_type = other DNA
cgcccgactctaatcaaggcaggg

SEQ ID NO: 10137 - DNA, 24 bp, synthetic construct
  misc_feature 1..24: note = Synthetic
  source 1..24: mol_type = other DNA
ggaccgggttaaggaattttgttt

SEQ ID NO: 10138 - DNA, 24 bp, synthetic construct
  misc_feature 1..24: note = Synthetic
  source 1..24: mol_type = other DNA
agcccagtgtgtcaccacacttcc

SEQ ID NO: 10139 - DNA, 24 bp, synthetic construct
  misc_feature 1..24: note = Synthetic
  source 1..24: mol_type = other DNA
tatcttcatcgttgtcgttgcagg

SEQ ID NO: 10140 - DNA, 24 bp, synthetic construct
  misc_feature 1..24: note = Synthetic
  source 1..24: mol_type = other DNA
cccacggccatcgggttacaaaca

SEQ ID NO: 10141 - DNA, 24 bp, synthetic construct
  misc_feature 1..24: note = Synthetic
  source 1..24: mol_type = other DNA
ggcgatagtggcggatacctgcgc

SEQ ID NO: 10142 - DNA, 24 bp, synthetic construct
  misc_feature 1..24: note = Synthetic
  source 1..24: mol_type = other DNA
gcatcagatgatgcaaggcgttcg

SEQ ID NO: 10143 - DNA, 24 bp, synthetic construct
  misc_feature 1..24: note = Synthetic
  source 1..24: mol_type = other DNA
gttgagtagatatgcccgaggggc

SEQ ID NO: 10144 - DNA, 24 bp, synthetic construct
  misc_feature 1..24: note = Synthetic
  source 1..24: mol_type = other DNA
aggaaactgaacgcaaatgattcg

SEQ ID NO: 10145 - DNA, 24 bp, synthetic construct
  misc_feature 1..24: note = Synthetic
  source 1..24: mol_type = other DNA
tcttgtgtctttccgtagtgtcga

SEQ ID NO: 10146 - DNA, 24 bp, synthetic construct
  misc_feature 1..24: note = Synthetic
  source 1..24: mol_type = other DNA
agcacactgacagtataaccggag

SEQ ID NO: 10147 - DNA, 24 bp, synthetic construct
  misc_feature 1..24: note = Synthetic
  source 1..24: mol_type = other DNA
cagaggcttcaaggccatacacca

SEQ ID NO: 10148 - DNA, 24 bp, synthetic construct
  misc_feature 1..24: note = Synthetic
  source 1..24: mol_type = other DNA
agagtaataagttctaagtcatct

SEQ ID NO: 10149 - DNA, 24 bp, synthetic construct
  misc_feature 1..24: note = Synthetic
  source 1..24: mol_type = other DNA
tgttttaacctcatgttacaaagt

SEQ ID NO: 10150 - DNA, 24 bp, synthetic construct
  misc_feature 1..24: note = Synthetic
  source 1..24: mol_type = other DNA
cccatccgaaagcaactaaccctt

SEQ ID NO: 10151 - DNA, 24 bp, synthetic construct
  misc_feature 1..24: note = Synthetic
  source 1..24: mol_type = other DNA
gtaggggttcaccgaaatctacac

SEQ ID NO: 10152 - DNA, 24 bp, synthetic construct
  misc_feature 1..24: note = Synthetic
  source 1..24: mol_type = other DNA
gctattgacagtttagagagagtt

SEQ ID NO: 10153 - DNA, 24 bp, synthetic construct
  misc_feature 1..24: note = Synthetic
  source 1..24: mol_type = other DNA
gaattcccaacaaactgacatgca

SEQ ID NO: 10154 - DNA, 24 bp, synthetic construct
  misc_feature 1..24: note = Synthetic
  source 1..24: mol_type = other DNA
gtagttgactttacaatatgtatt

SEQ ID NO: 10155 - DNA, 24 bp, synthetic construct
  misc_feature 1..24: note = Synthetic
  source 1..24: mol_type = other DNA
ccgtagactgtaacgttaataggg

SEQ ID NO: 10156 - DNA, 24 bp, synthetic construct
  misc_feature 1..24: note = Synthetic
  source 1..24: mol_type = other DNA
aacattccgaccatcctaccggaa

SEQ ID NO: 10157 - DNA, 24 bp, synthetic construct
  misc_feature 1..24: note = Synthetic
  source 1..24: mol_type = other DNA
ctgacgtacattcctggaattacc

SEQ ID NO: 10158 - DNA, 24 bp, synthetic construct
  misc_feature 1..24: note = Synthetic
  source 1..24: mol_type = other DNA
accttttgtgtgctgggtaggttt

SEQ ID NO: 10159 - DNA, 24 bp, synthetic construct
  misc_feature 1..24: note = Synthetic
  source 1..24: mol_type = other DNA
agcacctcaacccactcttggtcg

SEQ ID NO: 10160 - DNA, 24 bp, synthetic construct
  misc_feature 1..24: note = Synthetic
  source 1..24: mol_type = other DNA
actagttaagaatcgaagcccgtt

SEQ ID NO: 10161 - DNA, 24 bp, synthetic construct
  misc_feature 1..24: note = Synthetic
  source 1..24: mol_type = other DNA
cctgcacggctattcgtgcaaagc

SEQ ID NO: 10162 - DNA, 24 bp, synthetic construct
  misc_feature 1..24: note = Synthetic
  source 1..24: mol_type = other DNA
aatgacccccagagagcgcttgtc

SEQ ID NO: 10163 - DNA, 24 bp, synthetic construct
  misc_feature 1..24: note = Synthetic
  source 1..24: mol_type = other DNA
ctctatgccaaactaccaatacat

SEQ ID NO: 10164 - DNA, 24 bp, synthetic construct
  misc_feature 1..24: note = Synthetic
  source 1..24: mol_type = other DNA
tccaacctgagaatcataaataga

SEQ ID NO: 10165 - DNA, 24 bp, synthetic construct
  misc_feature 1..24: note = Synthetic
  source 1..24: mol_type = other DNA
gcacgaatcgtcgttatcgtatgg

SEQ ID NO: 10166 - DNA, 24 bp, synthetic construct
  misc_feature 1..24: note = Synthetic
  source 1..24: mol_type = other DNA
gctgttcgagcgccctacaaccat

SEQ ID NO: 10167 - DNA, 24 bp, synthetic construct
  misc_feature 1..24: note = Synthetic
  source 1..24: mol_type = other DNA
agaccactgatcaagatctattta

SEQ ID NO: 10168 - DNA, 24 bp, synthetic construct
  misc_feature 1..24: note = Synthetic
  source 1..24: mol_type = other DNA
ttcactctattaaattcctatctt

SEQ ID NO: 10169 - DNA, 24 bp, synthetic construct
  misc_feature 1..24: note = Synthetic
  source 1..24: mol_type = other DNA
cagttcgacaacctctatgtcgat

SEQ ID NO: 10170 - DNA, 24 bp, synthetic construct
  misc_feature 1..24: note = Synthetic
  source 1..24: mol_type = other DNA
tagcgctggatatgccgggcacca

SEQ ID NO: 10171 - DNA, 24 bp, synthetic construct
  misc_feature 1..24: note = Synthetic
  source 1..24: mol_type = other DNA
tagtcccgggcccatatgcatacc

SEQ ID NO: 10172 - DNA, 24 bp, synthetic construct
  misc_feature 1..24: note = Synthetic
  source 1..24: mol_type = other DNA
agcggaccgagcaaagctactggt

SEQ ID NO: 10173 - DNA, 24 bp, synthetic construct
  misc_feature 1..24: note = Synthetic
  source 1..24: mol_type = other DNA
attaacttcataccccgtatcctt

SEQ ID NO: 10174 - DNA, 24 bp, synthetic construct
  misc_feature 1..24: note = Synthetic
  source 1..24: mol_type = other DNA
gtcggacgcggtctctgatgaccg

SEQ ID NO: 10175 - DNA, 24 bp, synthetic construct
  misc_feature 1..24: note = Synthetic
  source 1..24: mol_type = other DNA
ggacgtccgaaggagaccatattc

SEQ ID NO: 10176 - DNA, 24 bp, synthetic construct
  misc_feature 1..24: note = Synthetic
  source 1..24: mol_type = other DNA
tcggacatatcggtagcccttaac

SEQ ID NO: 10177 - DNA, 24 bp, synthetic construct
  misc_feature 1..24: note = Synthetic
  source 1..24: mol_type = other DNA
ccggaaaggcaaatattagtttat

SEQ ID NO: 10178 - DNA, 24 bp, synthetic construct
  misc_feature 1..24: note = Synthetic
  source 1..24: mol_type = other DNA
tccgcacgctcgaaaaaacgtcgt

SEQ ID NO: 10179 - DNA, 24 bp, synthetic construct
  misc_feature 1..24: note = Synthetic
  source 1..24: mol_type = other DNA
agctcgggagacataatgtagggc

SEQ ID NO: 10180 - DNA, 24 bp, synthetic construct
  misc_feature 1..24: note = Synthetic
  source 1..24: mol_type = other DNA
tatggagtgccgttttggcgttta

SEQ ID NO: 10181 - DNA, 24 bp, synthetic construct
  misc_feature 1..24: note = Synthetic
  source 1..24: mol_type = other DNA
tccagcagaccagcgggtttacaa

SEQ ID NO: 10182 - DNA, 24 bp, synthetic construct
  misc_feature 1..24: note = Synthetic
  source 1..24: mol_type = other DNA
acaagtgtagacgtaaatctcaat

SEQ ID NO: 10183 - DNA, 24 bp, synthetic construct
  misc_feature 1..24: note = Synthetic
  source 1..24: mol_type = other DNA
atctggtaatgttgataataccct

SEQ ID NO: 10184 - DNA, 24 bp, synthetic construct
  misc_feature 1..24: note = Synthetic
  source 1..24: mol_type = other DNA
ccgtccctatgtcactgctattac

SEQ ID NO: 10185 - DNA, 24 bp, synthetic construct
  misc_feature 1..24: note = Synthetic
  source 1..24: mol_type = other DNA
accggatcccgagacatatgatct

SEQ ID NO: 10186 - DNA, 24 bp, synthetic construct
  misc_feature 1..24: note = Synthetic
  source 1..24: mol_type = other DNA
tccctaattgaacatcctttgcgt

SEQ ID NO: 10187 - DNA, 24 bp, synthetic construct
  misc_feature 1..24: note = Synthetic
  source 1..24: mol_type = other DNA
caccctcccccaggagttctagat

SEQ ID NO: 10188 - DNA, 24 bp, synthetic construct
  misc_feature 1..24: note = Synthetic
  source 1..24: mol_type = other DNA
cggtatccggcttgtaactcaatc

SEQ ID NO: 10189 - DNA, 24 bp, synthetic construct
  misc_feature 1..24: note = Synthetic
  source 1..24: mol_type = other DNA
cttcgtgacaatacctttcggaat

SEQ ID NO: 10190 - DNA, 24 bp, synthetic construct
  misc_feature 1..24: note = Synthetic
  source 1..24: mol_type = other DNA
gagaagaatgctgtacaaccttga

SEQ ID NO: 10191 - DNA, 24 bp, synthetic construct
  misc_feature 1..24: note = Synthetic
  source 1..24: mol_type = other DNA
gtgatttatataacactggtaaac

SEQ ID NO: 10192 - DNA, 24 bp, synthetic construct
  misc_feature 1..24: note = Synthetic
  source 1..24: mol_type = other DNA
aacattttgatgattcggttacgc

SEQ ID NO: 10193 - DNA, 24 bp, synthetic construct
  misc_feature 1..24: note = Synthetic
  source 1..24: mol_type = other DNA
cttttgccgttttaccgcaaagca

SEQ ID NO: 10194 - DNA, 24 bp, synthetic construct
  misc_feature 1..24: note = Synthetic
  source 1..24: mol_type = other DNA
ggacattataacaatctagaacct

SEQ ID NO: 10195 - DNA, 24 bp, synthetic construct
  misc_feature 1..24: note = Synthetic
  source 1..24: mol_type = other DNA
tcgtcacacagcccggtgttggga

SEQ ID NO: 10196 - DNA, 24 bp, synthetic construct
  misc_feature 1..24: note = Synthetic
  source 1..24: mol_type = other DNA
ctgaccgtaaaatggcttgcctgt

SEQ ID NO: 10197 - DNA, 24 bp, synthetic construct
  misc_feature 1..24: note = Synthetic
  source 1..24: mol_type = other DNA
agttcctacgctaatacatgcctt

SEQ ID NO: 10198 - DNA, 24 bp, synthetic construct
  misc_feature 1..24: note = Synthetic
  source 1..24: mol_type = other DNA
cccatgcaaaagttggtatatgac

SEQ ID NO: 10199 - DNA, 24 bp, synthetic construct
  misc_feature 1..24: note = Synthetic
  source 1..24: mol_type = other DNA
tacattttataaatgttagcgccc

SEQ ID NO: 10200 - DNA, 24 bp, synthetic construct
  misc_feature 1..24: note = Synthetic
  source 1..24: mol_type = other DNA
acgtcttccaatccctctgctcta

SEQ ID NO: 10201 - DNA, 24 bp, synthetic construct
  misc_feature 1..24: note = Synthetic
  source 1..24: mol_type = other DNA
tgtttcattctgtgccacccggca

SEQ ID NO: 10202 - DNA, 24 bp, synthetic construct
  misc_feature 1..24: note = Synthetic
  source 1..24: mol_type = other DNA
gatcaagaacgccaggattcagcc

SEQ ID NO: 10203 - DNA, 24 bp, synthetic construct
  misc_feature 1..24: note = Synthetic
  source 1..24: mol_type = other DNA
ctcacacgagaggtcgtgttgccg

SEQ ID NO: 10204 - DNA, 24 bp, synthetic construct
  misc_feature 1..24: note = Synthetic
  source 1..24: mol_type = other DNA
gccccggctggcgtatcgccagaa

SEQ ID NO: 10205 - DNA, 24 bp, synthetic construct
  misc_feature 1..24: note = Synthetic
  source 1..24: mol_type = other DNA
tcaccaaaaacacatcgtctcatc

SEQ ID NO: 10206 - DNA, 24 bp, synthetic construct
  misc_feature 1..24: note = Synthetic
  source 1..24: mol_type = other DNA
acgtaatggagaaagatacaatcc

SEQ ID NO: 10207 - DNA, 24 bp, synthetic construct
  misc_feature 1..24: note = Synthetic
  source 1..24: mol_type = other DNA
atagcctcatcacgtttcctccga

SEQ ID NO: 10208 - DNA, 24 bp, synthetic construct
  misc_feature 1..24: note = Synthetic
  source 1..24: mol_type = other DNA
cgtggccccggagcggctaattgg

SEQ ID NO: 10209 - DNA, 24 bp, synthetic construct
  misc_feature 1..24: note = Synthetic
  source 1..24: mol_type = other DNA
gggagactgcatgaggcttgatta

SEQ ID NO: 10210 - DNA, 24 bp, synthetic construct
  misc_feature 1..24: note = Synthetic
  source 1..24: mol_type = other DNA
ttgatgccctactataacccttac

SEQ ID NO: 10211 - DNA, 24 bp, synthetic construct
  misc_feature 1..24: note = Synthetic
  source 1..24: mol_type = other DNA
tgtttggtctgatgtgtgtgataa

SEQ ID NO: 10212 - DNA, 24 bp, synthetic construct
  misc_feature 1..24: note = Synthetic
  source 1..24: mol_type = other DNA
tgagatggcgaaccgttggaatag

SEQ ID NO: 10213 - DNA, 24 bp, synthetic construct
  misc_feature 1..24: note = Synthetic
  source 1..24: mol_type = other DNA
tcaggattgtccctacacaaatat

SEQ ID NO: 10214 - DNA, 24 bp, synthetic construct
  misc_feature 1..24: note = Synthetic
  source 1..24: mol_type = other DNA
gcagccaaagcaaggatgcccgga

SEQ ID NO: 10215 - DNA, 24 bp, synthetic construct
  misc_feature 1..24: note = Synthetic
  source 1..24: mol_type = other DNA
gccctaagtttttcagtggagcga

SEQ ID NO: 10216 - DNA, 24 bp, synthetic construct
  misc_feature 1..24: note = Synthetic
  source 1..24: mol_type = other DNA
ggtgtgtatcctcgacaattcggg

SEQ ID NO: 10217 - DNA, 24 bp, synthetic construct
  misc_feature 1..24: note = Synthetic
  source 1..24: mol_type = other DNA
tagggtttgaccttcgtcgagagg

SEQ ID NO: 10218 - DNA, 24 bp, synthetic construct
  misc_feature 1..24: note = Synthetic
  source 1..24: mol_type = other DNA
ctctgcaatcatcatatcgttacc

SEQ ID NO: 10219 - DNA, 24 bp, synthetic construct
  misc_feature 1..24: note = Synthetic
  source 1..24: mol_type = other DNA
gcgtgtagacgagatgttgacgcc

SEQ ID NO: 10220 - DNA, 24 bp, synthetic construct
  misc_feature 1..24: note = Synthetic
  source 1..24: mol_type = other DNA
ctccgcaagctaggattttgtaac

SEQ ID NO: 10221 - DNA, 24 bp, synthetic construct
  misc_feature 1..24: note = Synthetic
  source 1..24: mol_type = other DNA
tgccatgcggctgggatggctatc

SEQ ID NO: 10222 - DNA, 24 bp, synthetic construct
  misc_feature 1..24: note = Synthetic
  source 1..24: mol_type = other DNA
gcaattgcagttctacactcactc

SEQ ID NO: 10223 - DNA, 24 bp, synthetic construct
  misc_feature 1..24: note = Synthetic
  source 1..24: mol_type = other DNA
tacacacccttcttagccattcat

SEQ ID NO: 10224 - DNA, 24 bp, synthetic construct
  misc_feature 1..24: note = Synthetic
  source 1..24: mol_type = other DNA
gtagatcggtagtcgggctaacac

SEQ ID NO: 10225 - DNA, 24 bp, synthetic construct
  misc_feature 1..24: note = Synthetic
  source 1..24: mol_type = other DNA
taaactctggatcggattacctcc

SEQ ID NO: 10226 - DNA, 24 bp, synthetic construct
  misc_feature 1..24: note = Synthetic
  source 1..24: mol_type = other DNA
cagactagagggggaggcgaccta

SEQ ID NO: 10227 - DNA, 24 bp, synthetic construct
  misc_feature 1..24: note = Synthetic
  source 1..24: mol_type = other DNA
gagtataacctagccaacctaagc

SEQ ID NO: 10228 - DNA, 24 bp, synthetic construct
  misc_feature 1..24: note = Synthetic
  source 1..24: mol_type = other DNA
ccattgtaacacccaaatcccgca

SEQ ID NO: 10229 - DNA, 24 bp, synthetic construct
  misc_feature 1..24: note = Synthetic
  source 1..24: mol_type = other DNA
agtgtaaccggatttcccaacaca

SEQ ID NO: 10230 - DNA, 24 bp, synthetic construct
  misc_feature 1..24: note = Synthetic
  source 1..24: mol_type = other DNA
ggtacgcttatagacccaatacca

SEQ ID NO: 10231 - DNA, 24 bp, synthetic construct
  misc_feature 1..24: note = Synthetic
  source 1..24: mol_type = other DNA
tagagtttctaatttaaaatttcg

SEQ ID NO: 10232 - DNA, 24 bp, synthetic construct
  misc_feature 1..24: note = Synthetic
  source 1..24: mol_type = other DNA
ccacgtctccgtatcggagtgaat

SEQ ID NO: 10233 - DNA, 24 bp, synthetic construct
  misc_feature 1..24: note = Synthetic
  source 1..24: mol_type = other DNA
ggtgatactgcgaacgacaatggc

SEQ ID NO: 10234 - DNA, 24 bp, synthetic construct
  misc_feature 1..24: note = Synthetic
  source 1..24: mol_type = other DNA
acataccttcagtagccgcctccc

SEQ ID NO: 10235 - DNA, 24 bp, synthetic construct
  misc_feature 1..24: note = Synthetic
  source 1..24: mol_type = other DNA
cgagggtatcgtattacatgaact

SEQ ID NO: 10236 - DNA, 24 bp, synthetic construct
  misc_feature 1..24: note = Synthetic
  source 1..24: mol_type = other DNA
tgtttccttcatatttccgtgttg

SEQ ID NO: 10237 - DNA, 24 bp, synthetic construct
  misc_feature 1..24: note = Synthetic
  source 1..24: mol_type = other DNA
attatcggtccgtctaaccgaagc

SEQ ID NO: 10238 - DNA, 24 bp, synthetic construct
  misc_feature 1..24: note = Synthetic
  source 1..24: mol_type = other DNA
tgtaccttcatcgatgcattatct

SEQ ID NO: 10239 - DNA, 24 bp, synthetic construct
  misc_feature 1..24: note = Synthetic
  source 1..24: mol_type = other DNA
caccccccggcgtttaaactccaa

SEQ ID NO: 10240 - DNA, 24 bp, synthetic construct
  misc_feature 1..24: note = Synthetic
  source 1..24: mol_type = other DNA
gccagcgagcctgctcacaagtat

SEQ ID NO: 10241 - DNA, 24 bp, synthetic construct
  misc_feature 1..24: note = Synthetic
  source 1..24: mol_type = other DNA
aatgatgtgtttgcacgtttcagc

SEQ ID NO: 10242 - DNA, 24 bp, synthetic construct
  misc_feature 1..24: note = Synthetic
  source 1..24: mol_type = other DNA
gagaatctgcttattctacccccg

SEQ ID NO: 10243 - DNA, 24 bp, synthetic construct
  misc_feature 1..24: note = Synthetic
  source 1..24: mol_type = other DNA
ctctatccaattctcgaactcacc

SEQ ID NO: 10244 - DNA, 24 bp, synthetic construct
  misc_feature 1..24: note = Synthetic
  source 1..24: mol_type = other DNA
cggaccgacacgagcacacataat

SEQ ID NO: 10245 - DNA, 24 bp, synthetic construct
  misc_feature 1..24: note = Synthetic
  source 1..24: mol_type = other DNA
ctgaccgctgttcataggtgcccc

SEQ ID NO: 10246 - DNA, 24 bp, synthetic construct
  misc_feature 1..24: note = Synthetic
  source 1..24: mol_type = other DNA
tcattgcctcaagcttgcctcaac

SEQ ID NO: 10247 - DNA, 24 bp, synthetic construct
  misc_feature 1..24: note = Synthetic
  source 1..24: mol_type = other DNA
cggtattactatgagtgcgcaacc

SEQ ID NO: 10248 - DNA, 24 bp, synthetic construct
  misc_feature 1..24: note = Synthetic
  source 1..24: mol_type = other DNA
ccgtcataagggacactgtaaaag

SEQ ID NO: 10249 - DNA, 24 bp, synthetic construct
  misc_feature 1..24: note = Synthetic
  source 1..24: mol_type = other DNA
cttgtgccgatttaaccgctggct

SEQ ID NO: 10250 - DNA, 24 bp, synthetic construct
  misc_feature 1..24: note = Synthetic
  source 1..24: mol_type = other DNA
tacacctatataattactgtgagt

SEQ ID NO: 10251 - DNA, 24 bp, synthetic construct
  misc_feature 1..24: note = Synthetic
  source 1..24: mol_type = other DNA
ctatcgtcgtgcaattatatccct

SEQ ID NO: 10252 - DNA, 24 bp, synthetic construct
  misc_feature 1..24: note = Synthetic
  source 1..24: mol_type = other DNA
cctgtctgagccgcccccctcttg

SEQ ID NO: 10253 - DNA, 24 bp, synthetic construct
  misc_feature 1..24: note = Synthetic
  source 1..24: mol_type = other DNA
tcaaaacggtccgagtccctaccg

SEQ ID NO: 10254 - DNA, 24 bp, synthetic construct
  misc_feature 1..24: note = Synthetic
  source 1..24: mol_type = other DNA
attcaagtctccctctataaatat

SEQ ID NO: 10255 - DNA, 24 bp, synthetic construct
  misc_feature 1..24: note = Synthetic
  source 1..24: mol_type = other DNA
cggtaatgcgtgccaatcaatgcg

SEQ ID NO: 10256 - DNA, 24 bp, synthetic construct
  misc_feature 1..24: note = Synthetic
  source 1..24: mol_type = other DNA
acattacaacagctgacaacactc

SEQ ID NO: 10257 - DNA, 24 bp, synthetic construct
  misc_feature 1..24: note = Synthetic
  source 1..24: mol_type = other DNA
ggactcacaaccgattttttacac

SEQ ID NO: 10258 - DNA, 24 bp, synthetic construct
  misc_feature 1..24: note = Synthetic
  source 1..24: mol_type = other DNA
ggtagcaagtgcagtcagctccgg

SEQ ID NO: 10259 - DNA, 24 bp, synthetic construct
  misc_feature 1..24: note = Synthetic
  source 1..24: mol_type = other DNA
tactagcaccacaaaaacaggagc

SEQ ID NO: 10260 - DNA, 24 bp, synthetic construct
  misc_feature 1..24: note = Synthetic
  source 1..24: mol_type = other DNA
tcacaactcaacttatgccctggt

SEQ ID NO: 10261 - DNA, 24 bp, synthetic construct
  misc_feature 1..24: note = Synthetic
  source 1..24: mol_type = other DNA
acgccaggcggagcataaccgtct

SEQ ID NO: 10262 - DNA, 24 bp, synthetic construct
  misc_feature 1..24: note = Synthetic
  source 1..24: mol_type = other DNA
ctcaggtgtcatgtcgttatggga

SEQ ID NO: 10263 - DNA, 24 bp, synthetic construct
  misc_feature 1..24: note = Synthetic
  source 1..24: mol_type = other DNA
cggtctacgagctaaaaataacat

SEQ ID NO: 10264 - DNA, 24 bp, synthetic construct
  misc_feature 1..24: note = Synthetic
  source 1..24: mol_type = other DNA
ttagaggcccggtttcatattcat

SEQ ID NO: 10265 - DNA, 24 bp, synthetic construct
  misc_feature 1..24: note = Synthetic
  source 1..24: mol_type = other DNA
tggccaactacgctcagccgatga

SEQ ID NO: 10266 - DNA, 24 bp, synthetic construct
  misc_feature 1..24: note = Synthetic
  source 1..24: mol_type = other DNA
gatccgatctacctaattgtctcc

SEQ ID NO: 10267 - DNA, 24 bp, synthetic construct
  misc_feature 1..24: note = Synthetic
  source 1..24: mol_type = other DNA
cgagcactcccatagaaccccgcg

SEQ ID NO: 10268 - DNA, 24 bp, synthetic construct
  misc_feature 1..24: note = Synthetic
  source 1..24: mol_type = other DNA
gacgatgtctaactcgctcggatc

SEQ ID NO: 10269 - DNA, 24 bp, synthetic construct
  misc_feature 1..24: note = Synthetic
  source 1..24: mol_type = other DNA
catacttcgtcttatgcaaggatg

SEQ ID NO: 10270 - DNA, 24 bp, synthetic construct
  misc_feature 1..24: note = Synthetic
  source 1..24: mol_type = other DNA
caacgacgcgagccatccgcgaag

SEQ ID NO: 10271 - DNA, 24 bp, synthetic construct
  misc_feature 1..24: note = Synthetic
  source 1..24: mol_type = other DNA
taccaacaaagcgacgggtccgat

SEQ ID NO: 10272 - DNA, 24 bp, synthetic construct
  misc_feature 1..24: note = Synthetic
  source 1..24: mol_type = other DNA
ccagtaatgaatttcaataaaatc

SEQ ID NO: 10273 - DNA, 24 bp, synthetic construct
  misc_feature 1..24: note = Synthetic
  source 1..24: mol_type = other DNA
ttcatcctctcaacctccagtacc

SEQ ID NO: 10274 - DNA, 24 bp, synthetic construct
  misc_feature 1..24: note = Synthetic
  source 1..24: mol_type = other DNA
acggcactctatacggcctttggt

SEQ ID NO: 10275 - DNA, 24 bp, synthetic construct
  misc_feature 1..24: note = Synthetic
  source 1..24: mol_type = other DNA
cggaacttggctggccaaaccgat

SEQ ID NO: 10276 - DNA, 24 bp, synthetic construct
  misc_feature 1..24: note = Synthetic
  source 1..24: mol_type = other DNA
gcacttcaacgcacacgcccattc

SEQ ID NO: 10277 - DNA, 24 bp, synthetic construct
  misc_feature 1..24: note = Synthetic
  source 1..24: mol_type = other DNA
aggtatctctacgggcgacgcctt

SEQ ID NO: 10278 - DNA, 24 bp, synthetic construct
  misc_feature 1..24: note = Synthetic
  source 1..24: mol_type = other DNA
tcccattaaatccagatatgtcta

SEQ ID NO: 10279 - DNA, 24 bp, synthetic construct
  misc_feature 1..24: note = Synthetic
  source 1..24: mol_type = other DNA
ctgtgttaggacgtttgtcagcat

SEQ ID NO: 10280 - DNA, 24 bp, synthetic construct
  misc_feature 1..24: note = Synthetic
  source 1..24: mol_type = other DNA
tgccctaatgtttggacctagttt

SEQ ID NO: 10281 - DNA, 24 bp, synthetic construct
  misc_feature 1..24: note = Synthetic
  source 1..24: mol_type = other DNA
aaagaccttgcattataacttttc

SEQ ID NO: 10282 - DNA, 24 bp, synthetic construct
  misc_feature 1..24: note = Synthetic
  source 1..24: mol_type = other DNA
atctcgcgccaccctaagaatcaa

SEQ ID NO: 10283 - DNA, 24 bp, synthetic construct
  misc_feature 1..24: note = Synthetic
  source 1..24: mol_type = other DNA
atacatccctgattttaatcacat

SEQ ID NO: 10284 - DNA, 24 bp, synthetic construct
  misc_feature 1..24: note = Synthetic
  source 1..24: mol_type = other DNA
taggactactaaaccggaaatgat

SEQ ID NO: 10285 - DNA, 24 bp, synthetic construct
  misc_feature 1..24: note = Synthetic
  source 1..24: mol_type = other DNA
agccgcgagtgttgagatgacaat

SEQ ID NO: 10286 - DNA, 24 bp, synthetic construct
  misc_feature 1..24: note = Synthetic
  source 1..24: mol_type = other DNA
cttccatcaccacagtttacctcc

SEQ ID NO: 10287 - DNA, 24 bp, synthetic construct
  misc_feature 1..24: note = Synthetic
  source 1..24: mol_type = other DNA
ggaatgatgaaactacctcacagc

SEQ ID NO: 10288 - DNA, 24 bp, synthetic construct
  misc_feature 1..24: note = Synthetic
  source 1..24: mol_type = other DNA
gaggttatgtattctaggagatgg

SEQ ID NO: 10289 - DNA, 24 bp, synthetic construct
  misc_feature 1..24: note = Synthetic
  source 1..24: mol_type = other DNA
tatgttgacttccaatgaaaggct

SEQ ID NO: 10290 - DNA, 24 bp, synthetic construct
  misc_feature 1..24: note = Synthetic
  source 1..24: mol_type = other DNA
ttctatcagtaccgactgtttgtc

SEQ ID NO: 10291 - DNA, 24 bp, synthetic construct
  misc_feature 1..24: note = Synthetic
  source 1..24: mol_type = other DNA
gctgctaaccaggactggcgtctt

SEQ ID NO: 10292 - DNA, 24 bp, synthetic construct
  misc_feature 1..24: note = Synthetic
  source 1..24: mol_type = other DNA
tttggcatcccccctgtagtgcgc

SEQ ID NO: 10293 - DNA, 24 bp, synthetic construct
  misc_feature 1..24: note = Synthetic
  source 1..24: mol_type = other DNA
tttttcgatcagaactttagctag

SEQ ID NO: 10294 - DNA, 24 bp, synthetic construct
  misc_feature 1..24: note = Synthetic
  source 1..24: mol_type = other DNA
tgcaacactgcacaatgaagacag

SEQ ID NO: 10295 - DNA, 24 bp, synthetic construct
  misc_feature 1..24: note = Synthetic
  source 1..24: mol_type = other DNA
ggactcttctttcctccactgtga

SEQ ID NO: 10296 - DNA, 24 bp, synthetic construct
  misc_feature 1..24: note = Synthetic
  source 1..24: mol_type = other DNA
taagggggagtcagttccatctca

SEQ ID NO: 10297 - DNA, 24 bp, synthetic construct
  misc_feature 1..24: note = Synthetic
  source 1..24: mol_type = other DNA
ctcttgaccgtccggcaagacccg

SEQ ID NO: 10298 - DNA, 24 bp, synthetic construct
  misc_feature 1..24: note = Synthetic
  source 1..24: mol_type = other DNA
aagacttcggtccgtagtcttgat

SEQ ID NO: 10299 - DNA, 24 bp, synthetic construct
  misc_feature 1..24: note = Synthetic
  source 1..24: mol_type = other DNA
gcaaaggtcacagatgcctctaat

SEQ ID NO: 10300 - DNA, 24 bp, synthetic construct
  misc_feature 1..24: note = Synthetic
  source 1..24: mol_type = other DNA
taacagtttgtgtatgtggggtca

SEQ ID NO: 10301 - DNA, 24 bp, synthetic construct
  misc_feature 1..24: note = Synthetic
  source 1..24: mol_type = other DNA
tgccttgccgtagtcaaactcacc

SEQ ID NO: 10302 - DNA, 24 bp, synthetic construct
  misc_feature 1..24: note = Synthetic
  source 1..24: mol_type = other DNA
ttggcaaccgtcagacacccttta

SEQ ID NO: 10303 - DNA, 24 bp, synthetic construct
  misc_feature 1..24: note = Synthetic
  source 1..24: mol_type = other DNA
ggtagtagcaaaaacgctcagttt

SEQ ID NO: 10304 - DNA, 24 bp, synthetic construct
  misc_feature 1..24: note = Synthetic
  source 1..24: mol_type = other DNA
tgctaacattaccctggcctgtcc

SEQ ID NO: 10305 - DNA, 24 bp, synthetic construct
  misc_feature 1..24: note = Synthetic
  source 1..24: mol_type = other DNA
ttgtcgccagtcatctgtatattt

SEQ ID NO: 10306 - DNA, 24 bp, synthetic construct
  misc_feature 1..24: note = Synthetic
  source 1..24: mol_type = other DNA
agaccaaatcatttatgagtcccg

SEQ ID NO: 10307 - DNA, 24 bp, synthetic construct
  misc_feature 1..24: note = Synthetic
  source 1..24: mol_type = other DNA
gttcgaaactaatagtcgcccttt

SEQ ID NO: 10308 - DNA, 24 bp, synthetic construct
  misc_feature 1..24: note = Synthetic
  source 1..24: mol_type = other DNA
attatgtttagaactaatatctag

SEQ ID NO: 10309 - DNA, 24 bp, synthetic construct
  misc_feature 1..24: note = Synthetic
  source 1..24: mol_type = other DNA
gactcgagtataagtgcgatactt

SEQ ID NO: 10310 - DNA, 24 bp, synthetic construct
  misc_feature 1..24: note = Synthetic
  source 1..24: mol_type = other DNA
ttccaggataggggcgcacgctcc

SEQ ID NO: 10311 - DNA, 24 bp, synthetic construct
  misc_feature 1..24: note = Synthetic
  source 1..24: mol_type = other DNA
caacgtcactcacgccatcttttc

SEQ ID NO: 10312 - DNA, 24 bp, synthetic construct
  misc_feature 1..24: note = Synthetic
  source 1..24: mol_type = other DNA
aaaccatctccgacatgaatgtta

SEQ ID NO: 10313 - DNA, 24 bp, synthetic construct
  misc_feature 1..24: note = Synthetic
  source 1..24: mol_type = other DNA
agatcctcagttgcccggatggtt

SEQ ID NO: 10314 - DNA, 24 bp, synthetic construct
  misc_feature 1..24: note = Synthetic
  source 1..24: mol_type = other DNA
caaacttggttggcatgcaaagat

SEQ ID NO: 10315 - DNA, 24 bp, synthetic construct
  misc_feature 1..24: note = Synthetic
  source 1..24: mol_type = other DNA
aagaggatgtggtagccattttcc

SEQ ID NO: 10316 - DNA, 24 bp, synthetic construct
  misc_feature 1..24: note = Synthetic
  source 1..24: mol_type = other DNA
ggatacatcctataatgtgcatta

SEQ ID NO: 10317 - DNA, 24 bp, synthetic construct
  misc_feature 1..24: note = Synthetic
  source 1..24: mol_type = other DNA
gccagcgaggaggccttgcgtata

SEQ ID NO: 10318 - DNA, 24 bp, synthetic construct
  misc_feature 1..24: note = Synthetic
  source 1..24: mol_type = other DNA
aacctgcagtacttaagacttagg

SEQ ID NO: 10319 - DNA, 24 bp, synthetic construct
  misc_feature 1..24: note = Synthetic
  source 1..24: mol_type = other DNA
tcagattctgttacagaagtaaaa

SEQ ID NO: 10320 - DNA, 24 bp, synthetic construct
  misc_feature 1..24: note = Synthetic
  source 1..24: mol_type = other DNA
cagcttataaaagtattgatgttg

SEQ ID NO: 10321 - DNA, 24 bp, synthetic construct
  misc_feature 1..24: note = Synthetic
  source 1..24: mol_type = other DNA
tccagctcacagaaaagcgccccc

SEQ ID NO: 10322 - DNA, 24 bp, synthetic construct
  misc_feature 1..24: note = Synthetic
  source 1..24: mol_type = other DNA
tatgatcccccgggcgtatttagc

SEQ ID NO: 10323 - DNA, 24 bp, synthetic construct
  misc_feature 1..24: note = Synthetic
  source 1..24: mol_type = other DNA
tttgaatatcgggttttttccaat

SEQ ID NO: 10324 - DNA, 24 bp, synthetic construct
  misc_feature 1..24: note = Synthetic
  source 1..24: mol_type = other DNA
aataatatcatatcaacgccattc

SEQ ID NO: 10325 - DNA, 24 bp, synthetic construct
  misc_feature 1..24: note = Synthetic
  source 1..24: mol_type = other DNA
gttctataacagggcaccaccctg

SEQ ID NO: 10326 - DNA, 24 bp, synthetic construct
  misc_feature 1..24: note = Synthetic
  source 1..24: mol_type = other DNA
accccgtgcaggggatgctaggtg

SEQ ID NO: 10327 - DNA, 24 bp, synthetic construct
  misc_feature 1..24: note = Synthetic
  source 1..24: mol_type = other DNA
ccatctacgcctgccgggcgggcg

SEQ ID NO: 10328 - DNA, 24 bp, synthetic construct
  misc_feature 1..24: note = Synthetic
  source 1..24: mol_type = other DNA
gtataacgccggagatccacgaca

SEQ ID NO: 10329 - DNA, 24 bp, synthetic construct
  misc_feature 1..24: note = Synthetic
  source 1..24: mol_type = other DNA
gcaatggcgctctcagacgtagtc

SEQ ID NO: 10330 - DNA, 24 bp, synthetic construct
  misc_feature 1..24: note = Synthetic
  source 1..24: mol_type = other DNA
gcaaggcctcgtttgtgtgcggag

SEQ ID NO: 10331 - DNA, 24 bp, synthetic construct
  misc_feature 1..24: note = Synthetic
  source 1..24: mol_type = other DNA
caatgcgggaatgaagttatcggt

SEQ ID NO: 10332 - DNA, 24 bp, synthetic construct
  misc_feature 1..24: note = Synthetic
  source 1..24: mol_type = other DNA
tgttgaatcggtaacgatgacctg

SEQ ID NO: 10333 - DNA, 24 bp, synthetic construct
  misc_feature 1..24: note = Synthetic
  source 1..24: mol_type = other DNA
cgcgtgttgcttgacggcctaacc

SEQ ID NO: 10334 - DNA, 24 bp, synthetic construct
  misc_feature 1..24: note = Synthetic
  source 1..24: mol_type = other DNA
tctacgtccggctgctcgtatcta

SEQ ID NO: 10335 - DNA, 24 bp, synthetic construct
  misc_feature 1..24: note = Synthetic
  source 1..24: mol_type = other DNA
tccaccttatgcaccgacgttcca

SEQ ID NO: 10336 - DNA, 24 bp, synthetic construct
  misc_feature 1..24: note = Synthetic
  source 1..24: mol_type = other DNA
tgggtaataactgtgagcggggtt

SEQ ID NO: 10337 - DNA, 24 bp, synthetic construct
  misc_feature 1..24: note = Synthetic
  source 1..24: mol_type = other DNA
aacgcataccccttgtggatttaa

SEQ ID NO: 10338 - DNA, 24 bp, synthetic construct
  misc_feature 1..24: note = Synthetic
  source 1..24: mol_type = other DNA
catacccctgggacacatcattga

SEQ ID NO: 10339 - DNA, 24 bp, synthetic construct
  misc_feature 1..24: note = Synthetic
  source 1..24: mol_type = other DNA
tacatacagacctacacgtagacc

SEQ ID NO: 10340 - DNA, 24 bp, synthetic construct
  misc_feature 1..24: note = Synthetic
  source 1..24: mol_type = other DNA
tccgtgttggtcaagcgacgcgcc

SEQ ID NO: 10341 - DNA, 24 bp, synthetic construct
  misc_feature 1..24: note = Synthetic
  source 1..24: mol_type = other DNA
ctgcgaagacggcaacatcagata

SEQ ID NO: 10342 - DNA, 24 bp, synthetic construct
  misc_feature 1..24: note = Synthetic
  source 1..24: mol_type = other DNA
cgtcccaatgcgactttataacta

SEQ ID NO: 10343 - DNA, 24 bp, synthetic construct
  misc_feature 1..24: note = Synthetic
  source 1..24: mol_type = other DNA
gcccttagcgcatctcgcccttga

SEQ ID NO: 10344 - DNA, 24 bp, synthetic construct
  misc_feature 1..24: note = Synthetic
  source 1..24: mol_type = other DNA
ccaaatcacgatattttgagtata

SEQ ID NO: 10345 - DNA, 24 bp, synthetic construct
  misc_feature 1..24: note = Synthetic
  source 1..24: mol_type = other DNA
agtttggagaatactccatggcac

SEQ ID NO: 10346 - DNA, 24 bp, synthetic construct
  misc_feature 1..24: note = Synthetic
  source 1..24: mol_type = other DNA
ttcgagcctgtggtcagaatcact

SEQ ID NO: 10347 - DNA, 24 bp, synthetic construct
  misc_feature 1..24: note = Synthetic
  source 1..24: mol_type = other DNA
aagatacactgctcctttagttca

SEQ ID NO: 10348 - DNA, 24 bp, synthetic construct
  misc_feature 1..24: note = Synthetic
  source 1..24: mol_type = other DNA
ccattatggactactatatccctt

SEQ ID NO: 10349 - DNA, 24 bp, synthetic construct
  misc_feature 1..24: note = Synthetic
  source 1..24: mol_type = other DNA
tttcggtcgaacatagacgaccgg

SEQ ID NO: 10350 - DNA, 24 bp, synthetic construct
  misc_feature 1..24: note = Synthetic
  source 1..24: mol_type = other DNA
acttggcagctgttagttgccttt

SEQ ID NO: 10351 - DNA, 24 bp, synthetic construct
  misc_feature 1..24: note = Synthetic
  source 1..24: mol_type = other DNA
agatgagacaggccttgccatgga

SEQ ID NO: 10352 - DNA, 24 bp, synthetic construct
  misc_feature 1..24: note = Synthetic
  source 1..24: mol_type = other DNA
caaatctctgttgaccagacggtg

SEQ ID NO: 10353 - DNA, 24 bp, synthetic construct
  misc_feature 1..24: note = Synthetic
  source 1..24: mol_type = other DNA
actgccactgataaactaccgcgt

SEQ ID NO: 10354 - DNA, 24 bp, synthetic construct
  misc_feature 1..24: note = Synthetic
  source 1..24: mol_type = other DNA
tcagagcaatatcccataatcagt

SEQ ID NO: 10355 - DNA, 24 bp, synthetic construct
  misc_feature 1..24: note = Synthetic
  source 1..24: mol_type = other DNA
cgaaatgcccatacagctcccccg

SEQ ID NO: 10356 - DNA, 24 bp, synthetic construct
  misc_feature 1..24: note = Synthetic
  source 1..24: mol_type = other DNA
gctggtgtttccaaggcatacgtt

SEQ ID NO: 10357 - DNA, 24 bp, synthetic construct
  misc_feature 1..24: note = Synthetic
  source 1..24: mol_type = other DNA
atacggcgtccgccccgctacctt

SEQ ID NO: 10358 - DNA, 24 bp, synthetic construct
  misc_feature 1..24: note = Synthetic
  source 1..24: mol_type = other DNA
cacggcgcgtaggactcgtggcaa

SEQ ID NO: 10359 - DNA, 24 bp, synthetic construct
  misc_feature 1..24: note = Synthetic
  source 1..24: mol_type = other DNA
cgaataagaggtgccgacgagcca

SEQ ID NO: 10360 - DNA, 24 bp, synthetic construct
  misc_feature 1..24: note = Synthetic
  source 1..24: mol_type = other DNA
ttcgttgtactggatttcggactc

SEQ ID NO: 10361 - DNA, 24 bp, synthetic construct
  misc_feature 1..24: note = Synthetic
  source 1..24: mol_type = other DNA
aatatatcataaagaagtaacaat

SEQ ID NO: 10362 - DNA, 24 bp, synthetic construct
  misc_feature 1..24: note = Synthetic
  source 1..24: mol_type = other DNA
tcttaatttaggttactgtgttaa

SEQ ID NO: 10363 - DNA, 24 bp, synthetic construct
  misc_feature 1..24: note = Synthetic
  source 1..24: mol_type = other DNA
tagtgacaggccacattactatgt

SEQ ID NO: 10364 - DNA, 24 bp, synthetic construct
  misc_feature 1..24: note = Synthetic
  source 1..24: mol_type = other DNA
ctgagttacgataagtaagcacac

SEQ ID NO: 10365 - DNA, 24 bp, synthetic construct
  misc_feature 1..24: note = Synthetic
  source 1..24: mol_type = other DNA
tatgagtattctccaccacagttg

SEQ ID NO: 10366 - DNA, 24 bp, synthetic construct
  misc_feature 1..24: note = Synthetic
  source 1..24: mol_type = other DNA
cgctcaccagcagtccttaggctt

SEQ ID NO: 10367 - DNA, 24 bp, synthetic construct
  misc_feature 1..24: note = Synthetic
  source 1..24: mol_type = other DNA
gacgttcagtggaatcgctatccc

SEQ ID NO: 10368 - DNA, 24 bp, synthetic construct
  misc_feature 1..24: note = Synthetic
  source 1..24: mol_type = other DNA
atcacggcatttaaggagtggggt

SEQ ID NO: 10369 - DNA, 24 bp, synthetic construct
  misc_feature 1..24: note = Synthetic
  source 1..24: mol_type = other DNA
taccggacatgctcactgtgcgaa

SEQ ID NO: 10370 - DNA, 24 bp, synthetic construct
  misc_feature 1..24: note = Synthetic
  source 1..24: mol_type = other DNA
aaatcgctcgatatgcaaccgaca

SEQ ID NO: 10371 - DNA, 24 bp, synthetic construct
  misc_feature 1..24: note = Synthetic
  source 1..24: mol_type = other DNA
tgcattagagctaatctacgcgcg

SEQ ID NO: 10372 - DNA, 24 bp, synthetic construct
  misc_feature 1..24: note = Synthetic
  source 1..24: mol_type = other DNA
cgtcgagcgtctggccgtcccata

SEQ ID NO: 10373 - DNA, 24 bp, synthetic construct
  misc_feature 1..24: note = Synthetic
  source 1..24: mol_type = other DNA
cgatagcctgcctcaagtcaaatt

SEQ ID NO: 10374 - DNA, 24 bp, synthetic construct
  misc_feature 1..24: note = Synthetic
  source 1..24: mol_type = other DNA
tggcgcatcctaaagtgtaagatt

SEQ ID NO: 10375 - DNA, 24 bp, synthetic construct
  misc_feature 1..24: note = Synthetic
  source 1..24: mol_type = other DNA
attataaggaatgtctacaaaagg

SEQ ID NO: 10376 - DNA, 24 bp, synthetic construct
  misc_feature 1..24: note = Synthetic
  source 1..24: mol_type = other DNA
tagccactgagatggggtcgacac

SEQ ID NO: 10377 - DNA, 24 bp, synthetic construct
  misc_feature 1..24: note = Synthetic
  source 1..24: mol_type = other DNA
ttcttacacataacaatggacaat

SEQ ID NO: 10378 - DNA, 24 bp, synthetic construct
  misc_feature 1..24: note = Synthetic
  source 1..24: mol_type = other DNA
cgcggcatggcaagagttcatatg

SEQ ID NO: 10379 - DNA, 24 bp, synthetic construct
  misc_feature 1..24: note = Synthetic
  source 1..24: mol_type = other DNA
tatcgtggtacgaggaaacttgat

SEQ ID NO: 10380 - DNA, 24 bp, synthetic construct
  misc_feature 1..24: note = Synthetic
  source 1..24: mol_type = other DNA
ccgtcacataacatgtgactcaat

SEQ ID NO: 10381 - DNA, 24 bp, synthetic construct
  misc_feature 1..24: note = Synthetic
  source 1..24: mol_type = other DNA
ccagttagtctttgtttatcatat

SEQ ID NO: 10382 - DNA, 24 bp, synthetic construct
  misc_feature 1..24: note = Synthetic
  source 1..24: mol_type = other DNA
gctaaataaattactaaaggacgc

SEQ ID NO: 10383 - DNA, 24 bp, synthetic construct
  misc_feature 1..24: note = Synthetic
  source 1..24: mol_type = other DNA
ttgatgcacatagcacgggtacct

SEQ ID NO: 10384 - DNA, 24 bp, synthetic construct
  misc_feature 1..24: note = Synthetic
  source 1..24: mol_type = other DNA
ctgagaatcgagcatcctcaccca

SEQ ID NO: 10385 - DNA, 24 bp, synthetic construct
  misc_feature 1..24: note = Synthetic
  source 1..24: mol_type = other DNA
ttggtataagcaggcaatccgtta

SEQ ID NO: 10386 - DNA, 24 bp, synthetic construct
  misc_feature 1..24: note = Synthetic
  source 1..24: mol_type = other DNA
gtttgcaaccaatccccctattga

SEQ ID NO: 10387 - DNA, 24 bp, synthetic construct
  misc_feature 1..24: note = Synthetic
  source 1..24: mol_type = other DNA
gcagctagctcaggactttaaccg

SEQ ID NO: 10388 - DNA, 24 bp, synthetic construct
  misc_feature 1..24: note = Synthetic
  source 1..24: mol_type = other DNA
gcaaggtggtgtttacctgcatca

SEQ ID NO: 10389 - DNA, 24 bp, synthetic construct
  misc_feature 1..24: note = Synthetic
  source 1..24: mol_type = other DNA
gccgaaggagtgctttttacagcg

SEQ ID NO: 10390 - DNA, 24 bp, synthetic construct
  misc_feature 1..24: note = Synthetic
  source 1..24: mol_type = other DNA
cactgaactggtggtgttcgacgc

SEQ ID NO: 10391 - DNA, 24 bp, synthetic construct
  misc_feature 1..24: note = Synthetic
  source 1..24: mol_type = other DNA
cctagtttaatctgaaagactgcg

SEQ ID NO: 10392 - DNA, 24 bp, synthetic construct
  misc_feature 1..24: note = Synthetic
  source 1..24: mol_type = other DNA
cgtgccttgtcgaagccacgttaa

SEQ ID NO: 10393 - DNA, 24 bp, synthetic construct
  misc_feature 1..24: note = Synthetic
  source 1..24: mol_type = other DNA
ctgaatcaagctcccaccttgacc

SEQ ID NO: 10394 - DNA, 24 bp, synthetic construct
  misc_feature 1..24: note = Synthetic
  source 1..24: mol_type = other DNA
gcgcatacctttcgcattttccag

SEQ ID NO: 10395 - DNA, 24 bp, synthetic construct
  misc_feature 1..24: note = Synthetic
  source 1..24: mol_type = other DNA
ttaataagcttctttgctccaata

SEQ ID NO: 10396 - DNA, 24 bp, synthetic construct
  misc_feature 1..24: note = Synthetic
  source 1..24: mol_type = other DNA
cgtaatcctgaaaattagatttta

SEQ ID NO: 10397 - DNA, 24 bp, synthetic construct
  misc_feature 1..24: note = Synthetic
  source 1..24: mol_type = other DNA
cgtgtagcaccttctggctctcta

SEQ ID NO: 10398 - DNA, 24 bp, synthetic construct
  misc_feature 1..24: note = Synthetic
  source 1..24: mol_type = other DNA
agtaaaaaacagcttataaacctc

SEQ ID NO: 10399 - DNA, 24 bp, synthetic construct
  misc_feature 1..24: note = Synthetic
  source 1..24: mol_type = other DNA
atttaatttgtcagttgaacttca

SEQ ID NO: 10400 - DNA, 24 bp, synthetic construct
  misc_feature 1..24: note = Synthetic
  source 1..24: mol_type = other DNA
tagtcttagcacctttacgataat

SEQ ID NO: 10401 - DNA, 24 bp, synthetic construct
  misc_feature 1..24: note = Synthetic
  source 1..24: mol_type = other DNA
tcacgcaagccactcctgctgttc

SEQ ID NO: 10402 - DNA, 24 bp, synthetic construct
  misc_feature 1..24: note = Synthetic
  source 1..24: mol_type = other DNA
ggctgatacacagaccgactatga

SEQ ID NO: 10403 - DNA, 24 bp, synthetic construct
  misc_feature 1..24: note = Synthetic
  source 1..24: mol_type = other DNA
aactatgcaattcactttatttgc

SEQ ID NO: 10404 - DNA, 24 bp, synthetic construct
  misc_feature 1..24: note = Synthetic
  source 1..24: mol_type = other DNA
gtgcagatcggtctctatcggctt

SEQ ID NO: 10405 - DNA, 24 bp, synthetic construct
  misc_feature 1..24: note = Synthetic
  source 1..24: mol_type = other DNA
cgtatgccgattttcaccgccaac

SEQ ID NO: 10406 - DNA, 24 bp, synthetic construct
  misc_feature 1..24: note = Synthetic
  source 1..24: mol_type = other DNA
cccggtggtgaccgctccggtcga

SEQ ID NO: 10407 - DNA, 24 bp, synthetic construct
  misc_feature 1..24: note = Synthetic
  source 1..24: mol_type = other DNA
gtgtcaatactacggaaatttaaa

SEQ ID NO: 10408 - DNA, 24 bp, synthetic construct
  misc_feature 1..24: note = Synthetic
  source 1..24: mol_type = other DNA
agggatcatcggatttccatgcct

SEQ ID NO: 10409 - DNA, 24 bp, synthetic construct
  misc_feature 1..24: note = Synthetic
  source 1..24: mol_type = other DNA
ggcatacggctcaggaggtccggt

SEQ ID NO: 10410 - DNA, 24 bp, synthetic construct
  misc_feature 1..24: note = Synthetic
  source 1..24: mol_type = other DNA
gtaactgggttacgaccgtatgtt

SEQ ID NO: 10411 - DNA, 24 bp, synthetic construct
  misc_feature 1..24: note = Synthetic
  source 1..24: mol_type = other DNA
aaaacccagttatggcctggagac

SEQ ID NO: 10412 - DNA, 24 bp, synthetic construct
  misc_feature 1..24: note = Synthetic
  source 1..24: mol_type = other DNA
cgaaggaggaagaataattgacta

SEQ ID NO: 10413 - DNA, 24 bp, synthetic construct
  misc_feature 1..24: note = Synthetic
  source 1..24: mol_type = other DNA
attattttccttccacatttacat

SEQ ID NO: 10414 - DNA, 24 bp, synthetic construct
  misc_feature 1..24: note = Synthetic
  source 1..24: mol_type = other DNA
tgtaatattaccatgcaattgttg

SEQ ID NO: 10415 - DNA, 24 bp, synthetic construct
  misc_feature 1..24: note = Synthetic
  source 1..24: mol_type = other DNA
ttgtacggtatttggctgaattat

SEQ ID NO: 10416 - DNA, 24 bp, synthetic construct
  misc_feature 1..24: note = Synthetic
  source 1..24: mol_type = other DNA
ctcgtagtgacccagataccactc

SEQ ID NO: 10417 - DNA, 24 bp, synthetic construct
  misc_feature 1..24: note = Synthetic
  source 1..24: mol_type = other DNA
cgtggatgaggtgggcctcaaaat

SEQ ID NO: 10418 - DNA, 24 bp, synthetic construct
  misc_feature 1..24: note = Synthetic
  source 1..24: mol_type = other DNA
ccttcttcggggacggaagttaca

SEQ ID NO: 10419 - DNA, 24 bp, synthetic construct
  misc_feature 1..24: note = Synthetic
  source 1..24: mol_type = other DNA
ctcatgcccaaaaattgggtaacg

SEQ ID NO: 10420 - DNA, 24 bp, synthetic construct
  misc_feature 1..24: note = Synthetic
  source 1..24: mol_type = other DNA
aaaatgctcccgtccgttgggcca

SEQ ID NO: 10421 - DNA, 24 bp, synthetic construct
  misc_feature 1..24: note = Synthetic
  source 1..24: mol_type = other DNA
gcctactcaagcgcaagcgaatgc

SEQ ID NO: 10422 - DNA, 24 bp, synthetic construct
  misc_feature 1..24: note = Synthetic
  source 1..24: mol_type = other DNA
gactgatggctcgcgagctcgctt

SEQ ID NO: 10423 - DNA, 24 bp, synthetic construct
  misc_feature 1..24: note = Synthetic
  source 1..24: mol_type = other DNA
aacgtcatggcgtaaccggcggtc

SEQ ID NO: 10424 - DNA, 24 bp, synthetic construct
  misc_feature 1..24: note = Synthetic
  source 1..24: mol_type = other DNA
tggcttttgcaaaactgacttggt

SEQ ID NO: 10425 - DNA, 24 bp, synthetic construct
  misc_feature 1..24: note = Synthetic
  source 1..24: mol_type = other DNA
cgcggtatgattagcatatccgat

SEQ ID NO: 10426 - DNA, 24 bp, synthetic construct
  misc_feature 1..24: note = Synthetic
  source 1..24: mol_type = other DNA
cgcaaatgtgtgcatcgcacgtct

SEQ ID NO: 10427 - DNA, 24 bp, synthetic construct
  misc_feature 1..24: note = Synthetic
  source 1..24: mol_type = other DNA
gacacccttgtaggaatcgcggtg

SEQ ID NO: 10428 - DNA, 24 bp, synthetic construct
  misc_feature 1..24: note = Synthetic
  source 1..24: mol_type = other DNA
agtcagttctcctaaggaccgctc

SEQ ID NO: 10429 - DNA, 24 bp, synthetic construct
  misc_feature 1..24: note = Synthetic
  source 1..24: mol_type = other DNA
tcccagcggtgccatattcaagaa

SEQ ID NO: 10430 - DNA, 24 bp, synthetic construct
  misc_feature 1..24: note = Synthetic
  source 1..24: mol_type = other DNA
tcaggtgttagatccggctgggtt

SEQ ID NO: 10431 - DNA, 24 bp, synthetic construct
  misc_feature 1..24: note = Synthetic
  source 1..24: mol_type = other DNA
cacaccatctctttactgctccga

SEQ ID NO: 10432 - DNA, 24 bp, synthetic construct
  misc_feature 1..24: note = Synthetic
  source 1..24: mol_type = other DNA
ctcactgagcggacgcgattacct

SEQ ID NO: 10433 - DNA, 24 bp, synthetic construct
  misc_feature 1..24: note = Synthetic
  source 1..24: mol_type = other DNA
tcgaaagcacgctgcggagcgtga

SEQ ID NO: 10434 - DNA, 24 bp, synthetic construct
  misc_feature 1..24: note = Synthetic
  source 1..24: mol_type = other DNA
actaatgtcagataccacctcctc

SEQ ID NO: 10435 - DNA, 24 bp, synthetic construct
  misc_feature 1..24: note = Synthetic
  source 1..24: mol_type = other DNA
tatgatcaaagagggtttgcttcc

SEQ ID NO: 10436 - DNA, 24 bp, synthetic construct
  misc_feature 1..24: note = Synthetic
  source 1..24: mol_type = other DNA
cgcggctacgtagctttttcatga

SEQ ID NO: 10437 - DNA, 24 bp, synthetic construct
  misc_feature 1..24: note = Synthetic
  source 1..24: mol_type = other DNA
aagtacatccgcgtcaccgtccca

SEQ ID NO: 10438 - DNA, 24 bp, synthetic construct
  misc_feature 1..24: note = Synthetic
  source 1..24: mol_type = other DNA
gtatacaaacaccttcaccacgga

SEQ ID NO: 10439 - DNA, 24 bp, synthetic construct
  misc_feature 1..24: note = Synthetic
  source 1..24: mol_type = other DNA
gttaaaaaaattttagatttccgt

SEQ ID NO: 10440 - DNA, 24 bp, synthetic construct
  misc_feature 1..24: note = Synthetic
  source 1..24: mol_type = other DNA
cgggctcgaaacttatccgtggac

SEQ ID NO: 10441 - DNA, 24 bp, synthetic construct
  misc_feature 1..24: note = Synthetic
  source 1..24: mol_type = other DNA
agcatcgatgactcagtgtaaccc

SEQ ID NO: 10442 - DNA, 24 bp, synthetic construct
  misc_feature 1..24: note = Synthetic
  source 1..24: mol_type = other DNA
ttagtactatccctgagcctctgc

SEQ ID NO: 10443 - DNA, 24 bp, synthetic construct
  misc_feature 1..24: note = Synthetic
  source 1..24: mol_type = other DNA
ccaatagatccttcaagcagaacc

SEQ ID NO: 10444 - DNA, 24 bp, synthetic construct
  misc_feature 1..24: note = Synthetic
  source 1..24: mol_type = other DNA
cctccgcacgaccgattcagtgtc

SEQ ID NO: 10445 - DNA, 24 bp, synthetic construct
  misc_feature 1..24: note = Synthetic
  source 1..24: mol_type = other DNA
atcgtggcgggcttcgccccatgt

SEQ ID NO: 10446 - DNA, 24 bp, synthetic construct
  misc_feature 1..24: note = Synthetic
  source 1..24: mol_type = other DNA
cgtatggtcagatcagccccaaga

SEQ ID NO: 10447 - DNA, 24 bp, synthetic construct
  misc_feature 1..24: note = Synthetic
  source 1..24: mol_type = other DNA
aactgacaccccattactaccttt

SEQ ID NO: 10448 - DNA, 24 bp, synthetic construct
  misc_feature 1..24: note = Synthetic
  source 1..24: mol_type = other DNA
caaaaggtttccaagtccactccg

SEQ ID NO: 10449 - DNA, 24 bp, synthetic construct
  misc_feature 1..24: note = Synthetic
  source 1..24: mol_type = other DNA
tctcgtatattatacatcgtacac

SEQ ID NO: 10450 - DNA, 24 bp, synthetic construct
  misc_feature 1..24: note = Synthetic
  source 1..24: mol_type = other DNA
atactaaagtttccctaccaacat

SEQ ID NO: 10451 - DNA, 24 bp, synthetic construct
  misc_feature 1..24: note = Synthetic
  source 1..24: mol_type = other DNA
catcaggacgtaaaattgataagt

SEQ ID NO: 10452 - DNA, 24 bp, synthetic construct
  misc_feature 1..24: note = Synthetic
  source 1..24: mol_type = other DNA
tccccgttcatgctctgtggcgcc

SEQ ID NO: 10453 - DNA, 24 bp, synthetic construct
  misc_feature 1..24: note = Synthetic
  source 1..24: mol_type = other DNA
aaccagtgtgtgtgtcatcaaaca

SEQ ID NO: 10454 - DNA, 24 bp, synthetic construct
  misc_feature 1..24: note = Synthetic
  source 1..24: mol_type = other DNA
acacacgatgtacagataccttat

SEQ ID NO: 10455 - DNA, 24 bp, synthetic construct
  misc_feature 1..24: note = Synthetic
  source 1..24: mol_type = other DNA
tccggcccacacacagcccctcta

SEQ ID NO: 10456 - DNA, 24 bp, synthetic construct
  misc_feature 1..24: note = Synthetic
  source 1..24: mol_type = other DNA
caccaacccgacgaacatgcgata

SEQ ID NO: 10457 - DNA, 24 bp, synthetic construct
  misc_feature 1..24: note = Synthetic
  source 1..24: mol_type = other DNA
aaactgtacgaacgtctatccggt

SEQ ID NO: 10458 - DNA, 24 bp, synthetic construct
  misc_feature 1..24: note = Synthetic
  source 1..24: mol_type = other DNA
taggtattagaatagcctcggatt

SEQ ID NO: 10459 - DNA, 24 bp, synthetic construct
  misc_feature 1..24: note = Synthetic
  source 1..24: mol_type = other DNA
ccaagatcctggatcatttgatta

SEQ ID NO: 10460 - DNA, 24 bp, synthetic construct
  misc_feature 1..24: note = Synthetic
  source 1..24: mol_type = other DNA
tttatcaaaggaatccccaatttt

SEQ ID NO: 10461 - DNA, 24 bp, synthetic construct
  misc_feature 1..24: note = Synthetic
  source 1..24: mol_type = other DNA
tggaccggggcacacatatattgc

SEQ ID NO: 10462 - DNA, 24 bp, synthetic construct
  misc_feature 1..24: note = Synthetic
  source 1..24: mol_type = other DNA
agagattgcctagcgatctagtac

SEQ ID NO: 10463 - DNA, 24 bp, synthetic construct
  misc_feature 1..24: note = Synthetic
  source 1..24: mol_type = other DNA
gaactgatcatagagggaggctga

SEQ ID NO: 10464 - DNA, 24 bp, synthetic construct
  misc_feature 1..24: note = Synthetic
  source 1..24: mol_type = other DNA
gacaacgtctggaagttccatggt

SEQ ID NO: 10465 - DNA, 24 bp, synthetic construct
  misc_feature 1..24: note = Synthetic
  source 1..24: mol_type = other DNA
tttataaaccatcactacacgcga

SEQ ID NO: 10466 - DNA, 24 bp, synthetic construct
  misc_feature 1..24: note = Synthetic
  source 1..24: mol_type = other DNA
agcccgcaatcggtgtaatccgaa

SEQ ID NO: 10467 - DNA, 24 bp, synthetic construct
  misc_feature 1..24: note = Synthetic
  source 1..24: mol_type = other DNA
tctcccatagcagtgcagttagac

SEQ ID NO: 10468 - DNA, 24 bp, synthetic construct
  misc_feature 1..24: note = Synthetic
  source 1..24: mol_type = other DNA
actacaaaattcgacgttacggca

SEQ ID NO: 10469 - DNA, 24 bp, synthetic construct
  misc_feature 1..24: note = Synthetic
  source 1..24: mol_type = other DNA
tttatagtactatcgagggaactc

SEQ ID NO: 10470 - DNA, 24 bp, synthetic construct
  misc_feature 1..24: note = Synthetic
  source 1..24: mol_type = other DNA
actgtcacgagttctaacaagcag

SEQ ID NO: 10471 - DNA, 24 bp, synthetic construct
  misc_feature 1..24: note = Synthetic
  source 1..24: mol_type = other DNA
gcaaacatttgtgacattacgaaa

SEQ ID NO: 10472 - DNA, 24 bp, synthetic construct
  misc_feature 1..24: note = Synthetic
  source 1..24: mol_type = other DNA
tgtgcggccgccaccacgtgcgca

SEQ ID NO: 10473 - DNA, 24 bp, synthetic construct
  misc_feature 1..24: note = Synthetic
  source 1..24: mol_type = other DNA
tcatggctgactccctagaacatg

SEQ ID NO: 10474 - DNA, 24 bp, synthetic construct
  misc_feature 1..24: note = Synthetic
  source 1..24: mol_type = other DNA
aaagcgggcgcatttgcagtcact

SEQ ID NO: 10475 - DNA, 24 bp, synthetic construct
  misc_feature 1..24: note = Synthetic
  source 1..24: mol_type = other DNA
cgatgatcccggcttgtgcgtgag

SEQ ID NO: 10476 - DNA, 24 bp, synthetic construct
  misc_feature 1..24: note = Synthetic
  source 1..24: mol_type = other DNA
tcctgcaatttatgtttccaaacg

SEQ ID NO: 10477 - DNA, 24 bp, synthetic construct
  misc_feature 1..24: note = Synthetic
  source 1..24: mol_type = other DNA
cacctagctttgattgtgagctag

SEQ ID NO: 10478 - DNA, 24 bp, synthetic construct
  misc_feature 1..24: note = Synthetic
  source 1..24: mol_type = other DNA
atcttaccggcatgccgcgcacta

SEQ ID NO: 10479 - DNA, 24 bp, synthetic construct
  misc_feature 1..24: note = Synthetic
  source 1..24: mol_type = other DNA
cggtaaataatataggtccgtatt

SEQ ID NO: 10480 - DNA, 24 bp, synthetic construct
  misc_feature 1..24: note = Synthetic
  source 1..24: mol_type = other DNA
accacaccgtttgggacacatctc

SEQ ID NO: 10481 - DNA, 24 bp, synthetic construct
  misc_feature 1..24: note = Synthetic
  source 1..24: mol_type = other DNA
tgcattgattcacatcgactactc

SEQ ID NO: 10482 - DNA, 24 bp, synthetic construct
  misc_feature 1..24: note = Synthetic
  source 1..24: mol_type = other DNA
cacgatgttcacaggcagggtatg

SEQ ID NO: 10483 - DNA, 24 bp, synthetic construct
  misc_feature 1..24: note = Synthetic
  source 1..24: mol_type = other DNA
atatcagttcttggggctgtgtgt

SEQ ID NO: 10484 - DNA, 24 bp, synthetic construct
  misc_feature 1..24: note = Synthetic
  source 1..24: mol_type = other DNA
acacaatgctgctctcaggcactc

SEQ ID NO: 10485 - DNA, 24 bp, synthetic construct
  misc_feature 1..24: note = Synthetic
  source 1..24: mol_type = other DNA
agatacactttattaatgcgaatc

SEQ ID NO: 10486 - DNA, 24 bp, synthetic construct
  misc_feature 1..24: note = Synthetic
  source 1..24: mol_type = other DNA
cccacaatgcggtacgtgcaggga

SEQ ID NO: 10487 - DNA, 24 bp, synthetic construct
  misc_feature 1..24: note = Synthetic
  source 1..24: mol_type = other DNA
gggcccgctgcgccatcccgcctt

SEQ ID NO: 10488 - DNA, 24 bp, synthetic construct
  misc_feature 1..24: note = Synthetic
  source 1..24: mol_type = other DNA
tcggacaaaatctcattttcataa

SEQ ID NO: 10489 - DNA, 24 bp, synthetic construct
  misc_feature 1..24: note = Synthetic
  source 1..24: mol_type = other DNA
actgcggctgatcagatccccagg

SEQ ID NO: 10490 - DNA, 24 bp, synthetic construct
  misc_feature 1..24: note = Synthetic
  source 1..24: mol_type = other DNA
acacacccaatcggacacgtgcag

SEQ ID NO: 10491 - DNA, 24 bp, synthetic construct
  misc_feature 1..24: note = Synthetic
  source 1..24: mol_type = other DNA
ctgtggagcgcacaggacggcgcc

SEQ ID NO: 10492 - DNA, 24 bp, synthetic construct
  misc_feature 1..24: note = Synthetic
  source 1..24: mol_type = other DNA
ccgtatctttatagaatcctcgga

SEQ ID NO: 10493 - DNA, 24 bp, synthetic construct
  misc_feature 1..24: note = Synthetic
  source 1..24: mol_type = other DNA
ttcgcaattcttgtcatttgacgt

SEQ ID NO: 10494 - DNA, 24 bp, synthetic construct
  misc_feature 1..24: note = Synthetic
  source 1..24: mol_type = other DNA
accggcgcaaagtggtaccttatt

SEQ ID NO: 10495 - DNA, 24 bp, synthetic construct
  misc_feature 1..24: note = Synthetic
  source 1..24: mol_type = other DNA
ctttagaggtaacgcatgaacatc

SEQ ID NO: 10496 - DNA, 24 bp, synthetic construct
  misc_feature 1..24: note = Synthetic
  source 1..24: mol_type = other DNA
tagggcgtagacgacccttaataa

SEQ ID NO: 10497 - DNA, 24 bp, synthetic construct
  misc_feature 1..24: note = Synthetic
  source 1..24: mol_type = other DNA
acgcttaggctaatgtccttgtgc

SEQ ID NO: 10498 - DNA, 24 bp, synthetic construct
  misc_feature 1..24: note = Synthetic
  source 1..24: mol_type = other DNA
gcatattcagagcccgacatatgc

SEQ ID NO: 10499 - DNA, 24 bp, synthetic construct
  misc_feature 1..24: note = Synthetic
  source 1..24: mol_type = other DNA
attattaccgatccattactgacg

SEQ ID NO: 10500 - DNA, 24 bp, synthetic construct
  misc_feature 1..24: note = Synthetic
  source 1..24: mol_type = other DNA
caagaatagaaaatagctaacttc

SEQ ID NO: 10501 - DNA, 24 bp, synthetic construct
  misc_feature 1..24: note = Synthetic
  source 1..24: mol_type = other DNA
taccgacccatttgtccggcccga

SEQ ID NO: 10502 - DNA, 24 bp, synthetic construct
  misc_feature 1..24: note = Synthetic
  source 1..24: mol_type = other DNA
cttggacctccttggtccaacctt

SEQ ID NO: 10503 - DNA, 24 bp, synthetic construct
  misc_feature 1..24: note = Synthetic
  source 1..24: mol_type = other DNA
cagcgcagagcactaagcaggttg

SEQ ID NO: 10504 - DNA, 24 bp, synthetic construct
  misc_feature 1..24: note = Synthetic
  source 1..24: mol_type = other DNA
tctcgaacattagcttcacaagtc

SEQ ID NO: 10505 - DNA, 24 bp, synthetic construct
  misc_feature 1..24: note = Synthetic
  source 1..24: mol_type = other DNA
taacaaaactgaggtaaactttac

SEQ ID NO: 10506 - DNA, 24 bp, synthetic construct
  misc_feature 1..24: note = Synthetic
  source 1..24: mol_type = other DNA
gttttaccacttatgaaaatccga

SEQ ID NO: 10507 - DNA, 24 bp, synthetic construct
  misc_feature 1..24: note = Synthetic
  source 1..24: mol_type = other DNA
aataccatgaccaacaataagccc

SEQ ID NO: 10508 - DNA, 24 bp, synthetic construct
  misc_feature 1..24: note = Synthetic
  source 1..24: mol_type = other DNA
tttcgactaccgcgcaaactagct

SEQ ID NO: 10509 - DNA, 24 bp, synthetic construct
  misc_feature 1..24: note = Synthetic
  source 1..24: mol_type = other DNA
cgctgccaatcctccgatctctag

SEQ ID NO: 10510 - DNA, 24 bp, synthetic construct
  misc_feature 1..24: note = Synthetic
  source 1..24: mol_type = other DNA
tccctcgagggggtgtacctggaa

SEQ ID NO: 10511 - DNA, 24 bp, synthetic construct
  misc_feature 1..24: note = Synthetic
  source 1..24: mol_type = other DNA
agtctgaatacgaaagttattgtg

SEQ ID NO: 10512 - DNA, 24 bp, synthetic construct
  misc_feature 1..24: note = Synthetic
  source 1..24: mol_type = other DNA
ggagccggttctaatcgtcatggt

SEQ ID NO: 10513 - DNA, 24 bp, synthetic construct
  misc_feature 1..24: note = Synthetic
  source 1..24: mol_type = other DNA
tatcgtatgcagtgatgccatgtc

SEQ ID NO: 10514 - DNA, 24 bp, synthetic construct
  misc_feature 1..24: note = Synthetic
  source 1..24: mol_type = other DNA
cctcgtcttgcttaaggattcaaa

SEQ ID NO: 10515 - DNA, 24 bp, synthetic construct
  misc_feature 1..24: note = Synthetic
  source 1..24: mol_type = other DNA
ttcgaagatgcctttaacatcctc

SEQ ID NO: 10516 - DNA, 24 bp, synthetic construct
  misc_feature 1..24: note = Synthetic
  source 1..24: mol_type = other DNA
atgtctgtttatccgtctggcggc

SEQ ID NO: 10517 - DNA, 24 bp, synthetic construct
  misc_feature 1..24: note = Synthetic
  source 1..24: mol_type = other DNA
cgatgcggtcttcatctaaggatc

SEQ ID NO: 10518 - DNA, 24 bp, synthetic construct
  misc_feature 1..24: note = Synthetic
  source 1..24: mol_type = other DNA
ggcggggtggtgacggtcgcgtac

SEQ ID NO: 10519 - DNA, 24 bp, synthetic construct
  misc_feature 1..24: note = Synthetic
  source 1..24: mol_type = other DNA
caaacctttcccaagcctccaatc

SEQ ID NO: 10520 - DNA, 24 bp, synthetic construct
  misc_feature 1..24: note = Synthetic
  source 1..24: mol_type = other DNA
acctaacctaactacgcttgaacg

SEQ ID NO: 10521 - DNA, 24 bp, synthetic construct
  misc_feature 1..24: note = Synthetic
  source 1..24: mol_type = other DNA
aactgaccgccgaaacggatactc

SEQ ID NO: 10522 - DNA, 24 bp, synthetic construct
  misc_feature 1..24: note = Synthetic
  source 1..24: mol_type = other DNA
taggtctacttataatctgcacga

SEQ ID NO: 10523 - DNA, 24 bp, synthetic construct
  misc_feature 1..24: note = Synthetic
  source 1..24: mol_type = other DNA
gtccggcttgaaggtggcctctta

SEQ ID NO: 10524 - DNA, 24 bp, synthetic construct
  misc_feature 1..24: note = Synthetic
  source 1..24: mol_type = other DNA
agacgtttcatagcctacagaggc

SEQ ID NO: 10525 - DNA, 24 bp, synthetic construct
  misc_feature 1..24: note = Synthetic
  source 1..24: mol_type = other DNA
gcattacagtcgttgccaaagcta

SEQ ID NO: 10526 - DNA, 24 bp, synthetic construct
  misc_feature 1..24: note = Synthetic
  source 1..24: mol_type = other DNA
gcaaagcgcccatacatgcataac

SEQ ID NO: 10527 - DNA, 24 bp, synthetic construct
  misc_feature 1..24: note = Synthetic
  source 1..24: mol_type = other DNA
tcacagttgctgcgacatacgaac

SEQ ID NO: 10528 - DNA, 24 bp, synthetic construct
  misc_feature 1..24: note = Synthetic
  source 1..24: mol_type = other DNA
ttatggaagctaataccaattgta

SEQ ID NO: 10529 - DNA, 24 bp, synthetic construct
  misc_feature 1..24: note = Synthetic
  source 1..24: mol_type = other DNA
tacctccataaaccgaagaatgac

SEQ ID NO: 10530 - DNA, 24 bp, synthetic construct
  misc_feature 1..24: note = Synthetic
  source 1..24: mol_type = other DNA
taaacgacgttatacgacactcga

SEQ ID NO: 10531 - DNA, 24 bp, synthetic construct
  misc_feature 1..24: note = Synthetic
  source 1..24: mol_type = other DNA
ttgatttccagtgcgagaagaccg

SEQ ID NO: 10532 - DNA, 24 bp, synthetic construct
  misc_feature 1..24: note = Synthetic
  source 1..24: mol_type = other DNA
cccgcacgcaaactacattcgtca

SEQ ID NO: 10533 - DNA, 24 bp, synthetic construct
  misc_feature 1..24: note = Synthetic
  source 1..24: mol_type = other DNA
cgcattgtatttcgactggatggt

SEQ ID NO: 10534 - DNA, 24 bp, synthetic construct
  misc_feature 1..24: note = Synthetic
  source 1..24: mol_type = other DNA
ctgttcaattggtgactaacccac

SEQ ID NO: 10535 - DNA, 24 bp, synthetic construct
  misc_feature 1..24: note = Synthetic
  source 1..24: mol_type = other DNA
agcgatgataccctaacgcctagg

SEQ ID NO: 10536 - DNA, 24 bp, synthetic construct
  misc_feature 1..24: note = Synthetic
  source 1..24: mol_type = other DNA
tgagtgatcagagtcttaaagccc

SEQ ID NO: 10537 - DNA, 24 bp, synthetic construct
  misc_feature 1..24: note = Synthetic
  source 1..24: mol_type = other DNA
aaccttagactcttccgctccctt

SEQ ID NO: 10538 - DNA, 24 bp, synthetic construct
  misc_feature 1..24: note = Synthetic
  source 1..24: mol_type = other DNA
atgttatcagatcccccgcaacgg

SEQ ID NO: 10539 - DNA, 24 bp, synthetic construct
  misc_feature 1..24: note = Synthetic
  source 1..24: mol_type = other DNA
tgcagccacttttttaggcacctt

SEQ ID NO: 10540 - DNA, 24 bp, synthetic construct
  misc_feature 1..24: note = Synthetic
  source 1..24: mol_type = other DNA
tttggctttttcaccgcctactga

SEQ ID NO: 10541 - DNA, 24 bp, synthetic construct
  misc_feature 1..24: note = Synthetic
  source 1..24: mol_type = other DNA
ctctctcttcccaacttcctaggc

SEQ ID NO: 10542 - DNA, 24 bp, synthetic construct
  misc_feature 1..24: note = Synthetic
  source 1..24: mol_type = other DNA
acaccagcattaccctcgctcatt

SEQ ID NO: 10543 - DNA, 24 bp, synthetic construct
  misc_feature 1..24: note = Synthetic
  source 1..24: mol_type = other DNA
gttcaccgttgtgtcccctagatg

SEQ ID NO: 10544 - DNA, 24 bp, synthetic construct
  misc_feature 1..24: note = Synthetic
  source 1..24: mol_type = other DNA
tttacacctccgttaaccaacccc

SEQ ID NO: 10545 - DNA, 24 bp, synthetic construct
  misc_feature 1..24: note = Synthetic
  source 1..24: mol_type = other DNA
actcaccctggagggttactcggc

SEQ ID NO: 10546 - DNA, 24 bp, synthetic construct
  misc_feature 1..24: note = Synthetic
  source 1..24: mol_type = other DNA
ggtggatacctagtgtgaaacccg

SEQ ID NO: 10547 - DNA, 24 bp, synthetic construct
  misc_feature 1..24: note = Synthetic
  source 1..24: mol_type = other DNA
acaagatggatagcatctcggttg

SEQ ID NO: 10548 - DNA, 24 bp, synthetic construct
  misc_feature 1..24: note = Synthetic
  source 1..24: mol_type = other DNA
tatgatgtagccaaccgatgtcca

SEQ ID NO: 10549 - DNA, 24 bp, synthetic construct
  misc_feature 1..24: note = Synthetic
  source 1..24: mol_type = other DNA
ttaattcacttaattgcatttagt

SEQ ID NO: 10550 - DNA, 24 bp, synthetic construct
  misc_feature 1..24: note = Synthetic
  source 1..24: mol_type = other DNA
ggccccagtgcccgggttcgttca

SEQ ID NO: 10551 - DNA, 24 bp, synthetic construct
  misc_feature 1..24: note = Synthetic
  source 1..24: mol_type = other DNA
actctcagagattcttagaggtaa

SEQ ID NO: 10552 - DNA, 24 bp, synthetic construct
  misc_feature 1..24: note = Synthetic
  source 1..24: mol_type = other DNA
ttgctccttaaattgtggctacac

SEQ ID NO: 10553 - DNA, 24 bp, synthetic construct
  misc_feature 1..24: note = Synthetic
  source 1..24: mol_type = other DNA
caatgtgattcgaggccactgctt

SEQ ID NO: 10554 - DNA, 24 bp, synthetic construct
  misc_feature 1..24: note = Synthetic
  source 1..24: mol_type = other DNA
atacttcaaaaagaaattgaaccg

SEQ ID NO: 10555 - DNA, 24 bp, synthetic construct
  misc_feature 1..24: note = Synthetic
  source 1..24: mol_type = other DNA
tatgtagcacctgagtcttcctcg

SEQ ID NO: 10556 - DNA, 24 bp, synthetic construct
  misc_feature 1..24: note = Synthetic
  source 1..24: mol_type = other DNA
cacgaagcaggaactcgataacag

SEQ ID NO: 10557 - DNA, 24 bp, synthetic construct
  misc_feature 1..24: note = Synthetic
  source 1..24: mol_type = other DNA
atgacccgatgccggcctcaggcc

SEQ ID NO: 10558 - DNA, 24 bp, synthetic construct
  misc_feature 1..24: note = Synthetic
  source 1..24: mol_type = other DNA
tgcttaaaactaacacaaacagaa

SEQ ID NO: 10559 - DNA, 24 bp, synthetic construct
  misc_feature 1..24: note = Synthetic
  source 1..24: mol_type = other DNA
cattcctgttgtccctccttaacg

SEQ ID NO: 10560 - DNA, 24 bp, synthetic construct
  misc_feature 1..24: note = Synthetic
  source 1..24: mol_type = other DNA
tcacacacatgctcgctgactgtg

SEQ ID NO: 10561 - DNA, 24 bp, synthetic construct
  misc_feature 1..24: note = Synthetic
  source 1..24: mol_type = other DNA
tggcgccctggttgcgactctact

SEQ ID NO: 10562 - DNA, 24 bp, synthetic construct
  misc_feature 1..24: note = Synthetic
  source 1..24: mol_type = other DNA
cacccctcagctcagtcgccgatc

SEQ ID NO: 10563 - DNA, 24 bp, synthetic construct
  misc_feature 1..24: note = Synthetic
  source 1..24: mol_type = other DNA
aattcccattgtgattgggcctgc

SEQ ID NO: 10564 - DNA, 24 bp, synthetic construct
  misc_feature 1..24: note = Synthetic
  source 1..24: mol_type = other DNA
tctaactcttccacctccagacaa

SEQ ID NO: 10565 - DNA, 24 bp, synthetic construct
  misc_feature 1..24: note = Synthetic
  source 1..24: mol_type = other DNA
actgggtcacagtagtgattaccc

SEQ ID NO: 10566 - DNA, 24 bp, synthetic construct
  misc_feature 1..24: note = Synthetic
  source 1..24: mol_type = other DNA
tagccgccgttacgcctattctca

SEQ ID NO: 10567 - DNA, 24 bp, synthetic construct
  misc_feature 1..24: note = Synthetic
  source 1..24: mol_type = other DNA
acccaaagctgtcgtgggggaccg

SEQ ID NO: 10568 - DNA, 24 bp, synthetic construct
  misc_feature 1..24: note = Synthetic
  source 1..24: mol_type = other DNA
caacttggcctgcctcgggaaatt

SEQ ID NO: 10569 - DNA, 24 bp, synthetic construct
  misc_feature 1..24: note = Synthetic
  source 1..24: mol_type = other DNA
ctgacagtacagcgtcagtcatta

SEQ ID NO: 10570 - DNA, 24 bp, synthetic construct
  misc_feature 1..24: note = Synthetic
  source 1..24: mol_type = other DNA
agttcaaacaaggcagtcgggatt

SEQ ID NO: 10571 - DNA, 24 bp, synthetic construct
  misc_feature 1..24: note = Synthetic
  source 1..24: mol_type = other DNA
ccccattgtatatagattgtgaat

SEQ ID NO: 10572 - DNA, 24 bp, synthetic construct
  misc_feature 1..24: note = Synthetic
  source 1..24: mol_type = other DNA
gttataggtccagctaccggctca

SEQ ID NO: 10573 - DNA, 24 bp, synthetic construct
  misc_feature 1..24: note = Synthetic
  source 1..24: mol_type = other DNA
tcgatctttatcttcatcaagcaa

SEQ ID NO: 10574 - DNA, 24 bp, synthetic construct
  misc_feature 1..24: note = Synthetic
  source 1..24: mol_type = other DNA
aattgtcgtctagacatagcaagc

SEQ ID NO: 10575 - DNA, 24 bp, synthetic construct
  misc_feature 1..24: note = Synthetic
  source 1..24: mol_type = other DNA
tcataaccgatcaatacgccctca

SEQ ID NO: 10576 - DNA, 24 bp, synthetic construct
  misc_feature 1..24: note = Synthetic
  source 1..24: mol_type = other DNA
cttgcgcacagcttttttacgtga

SEQ ID NO: 10577 - DNA, 24 bp, synthetic construct
  misc_feature 1..24: note = Synthetic
  source 1..24: mol_type = other DNA
gctgttgtgtgtcatccagcatca

SEQ ID NO: 10578 - DNA, 24 bp, synthetic construct
  misc_feature 1..24: note = Synthetic
  source 1..24: mol_type = other DNA
gtatttaaagattcgaaccaatta

SEQ ID NO: 10579 - DNA, 24 bp, synthetic construct
  misc_feature 1..24: note = Synthetic
  source 1..24: mol_type = other DNA
tccattgcccgagttggggctgtc

SEQ ID NO: 10580 - DNA, 24 bp, synthetic construct
  misc_feature 1..24: note = Synthetic
  source 1..24: mol_type = other DNA
cccataccggcaaatactaccact

SEQ ID NO: 10581 - DNA, 24 bp, synthetic construct
  misc_feature 1..24: note = Synthetic
  source 1..24: mol_type = other DNA
tcacaccaccctttgcccggcggt

SEQ ID NO: 10582 - DNA, 24 bp, synthetic construct
  misc_feature 1..24: note = Synthetic
  source 1..24: mol_type = other DNA
acctacctcctgacacatcaactt

SEQ ID NO: 10583 - DNA, 24 bp, synthetic construct
  misc_feature 1..24: note = Synthetic
  source 1..24: mol_type = other DNA
cataccccgggcccccagcacacc

SEQ ID NO: 10584 - DNA, 24 bp, synthetic construct
  misc_feature 1..24: note = Synthetic
  source 1..24: mol_type = other DNA
gatgcatttggtttgtctgccctc

SEQ ID NO: 10585 - DNA, 24 bp, synthetic construct
  misc_feature 1..24: note = Synthetic
  source 1..24: mol_type = other DNA
gagtcgctccagcttcttacaaca

SEQ ID NO: 10586 - DNA, 24 bp, synthetic construct
  misc_feature 1..24: note = Synthetic
  source 1..24: mol_type = other DNA
gaccgcacggccgaaattctactc

SEQ ID NO: 10587 - DNA, 24 bp, synthetic construct
  misc_feature 1..24: note = Synthetic
  source 1..24: mol_type = other DNA
agttattagtaataatttaaacct

SEQ ID NO: 10588 - DNA, 24 bp, synthetic construct
  misc_feature 1..24: note = Synthetic
  source 1..24: mol_type = other DNA
tcccaaggagtggaagacatatgg

SEQ ID NO: 10589 - DNA, 24 bp, synthetic construct
  misc_feature 1..24: note = Synthetic
  source 1..24: mol_type = other DNA
atcggtgccccacatgacggccca

SEQ ID NO: 10590 - DNA, 24 bp, synthetic construct
  misc_feature 1..24: note = Synthetic
  source 1..24: mol_type = other DNA
aaattggtaggtctcgcttgaata

SEQ ID NO: 10591 - DNA, 24 bp, synthetic construct
  misc_feature 1..24: note = Synthetic
  source 1..24: mol_type = other DNA
ccagctatcgattcagatagtgtc

SEQ ID NO: 10592 - DNA, 24 bp, synthetic construct
  misc_feature 1..24: note = Synthetic
  source 1..24: mol_type = other DNA
tcacacgtattcgagtgcgcggtc

SEQ ID NO: 10593 - DNA, 24 bp, synthetic construct
  misc_feature 1..24: note = Synthetic
  source 1..24: mol_type = other DNA
tttgtcggggttgttgcacatcca

SEQ ID NO: 10594 - DNA, 24 bp, synthetic construct
  misc_feature 1..24: note = Synthetic
  source 1..24: mol_type = other DNA
ttctcacttacccacgctgacacc

SEQ ID NO: 10595 - DNA, 24 bp, synthetic construct
  misc_feature 1..24: note = Synthetic
  source 1..24: mol_type = other DNA
gatgactattttgactttctttct

SEQ ID NO: 10596 - DNA, 24 bp, synthetic construct
  misc_feature 1..24: note = Synthetic
  source 1..24: mol_type = other DNA
gctaccttgaactaatttccgacc

SEQ ID NO: 10597 - DNA, 24 bp, synthetic construct
  misc_feature 1..24: note = Synthetic
  source 1..24: mol_type = other DNA
tcatctctctttctatccgtagtc

SEQ ID NO: 10598 - DNA, 24 bp, synthetic construct
  misc_feature 1..24: note = Synthetic
  source 1..24: mol_type = other DNA
cgggctcaatccgagcggcaacga

SEQ ID NO: 10599 - DNA, 24 bp, synthetic construct
  misc_feature 1..24: note = Synthetic
  source 1..24: mol_type = other DNA
atagacgtttacattagttcgcgc

SEQ ID NO: 10600 - DNA, 24 bp, synthetic construct
  misc_feature 1..24: note = Synthetic
  source 1..24: mol_type = other DNA
gccttcaatggaattgcatcaatc

SEQ ID NO: 10601 - DNA, 24 bp, synthetic construct
  misc_feature 1..24: note = Synthetic
  source 1..24: mol_type = other DNA
atcgtattcaaccatgaacagtcc

SEQ ID NO: 10602 - DNA, 24 bp, synthetic construct
  misc_feature 1..24: note = Synthetic
  source 1..24: mol_type = other DNA
gttttggctacaattcgcgcaagc

SEQ ID NO: 10603 - DNA, 24 bp, synthetic construct
  misc_feature 1..24: note = Synthetic
  source 1..24: mol_type = other DNA
gctttttgacgatcaatctagcac

SEQ ID NO: 10604 - DNA, 24 bp, synthetic construct
  misc_feature 1..24: note = Synthetic
  source 1..24: mol_type = other DNA
ctcacctatgtaagatcaattttc

SEQ ID NO: 10605 - DNA, 24 bp, synthetic construct
  misc_feature 1..24: note = Synthetic
  source 1..24: mol_type = other DNA
agtcttgggtaagccttcctaaaa

SEQ ID NO: 10606 - DNA, 24 bp, synthetic construct
  misc_feature 1..24: note = Synthetic
  source 1..24: mol_type = other DNA
gacctgtcagatcctccccacgtc

SEQ ID NO: 10607 - DNA, 24 bp, synthetic construct
  misc_feature 1..24: note = Synthetic
  source 1..24: mol_type = other DNA
gcctcgcggcgtgacgatttcttc

SEQ ID NO: 10608 - DNA, 24 bp, synthetic construct
  misc_feature 1..24: note = Synthetic
  source 1..24: mol_type = other DNA
gtgaatttatgtctctatttattg

SEQ ID NO: 10609 - DNA, 24 bp, synthetic construct
  misc_feature 1..24: note = Synthetic
  source 1..24: mol_type = other DNA
tgatttcaacacttcattttcagg

SEQ ID NO: 10610 - DNA, 24 bp, synthetic construct
  misc_feature 1..24: note = Synthetic
  source 1..24: mol_type = other DNA
agacataacataatcaaagtatag

SEQ ID NO: 10611 - DNA, 24 bp, synthetic construct
  misc_feature 1..24: note = Synthetic
  source 1..24: mol_type = other DNA
cccatgtgatctcgcgattgtgtc

SEQ ID NO: 10612 - DNA, 24 bp, synthetic construct
  misc_feature 1..24: note = Synthetic
  source 1..24: mol_type = other DNA
ttcggacaggtcccaagagctagc

SEQ ID NO: 10613 - DNA, 24 bp, synthetic construct
  misc_feature 1..24: note = Synthetic
  source 1..24: mol_type = other DNA
tgttaaaattctcagctcttgacc

SEQ ID NO: 10614 - DNA, 24 bp, synthetic construct
  misc_feature 1..24: note = Synthetic
  source 1..24: mol_type = other DNA
tggtagcagcaggccgatatttta

SEQ ID NO: 10615 - DNA, 24 bp, synthetic construct
  misc_feature 1..24: note = Synthetic
  source 1..24: mol_type = other DNA
caaacacctcaaccgattatcgtc

SEQ ID NO: 10616 - DNA, 24 bp, synthetic construct
  misc_feature 1..24: note = Synthetic
  source 1..24: mol_type = other DNA
ttttctgcagacatacctttacca

SEQ ID NO: 10617 - DNA, 24 bp, synthetic construct
  misc_feature 1..24: note = Synthetic
  source 1..24: mol_type = other DNA
cccgtgcagttgagcgctagtgat

SEQ ID NO: 10618 - DNA, 24 bp, synthetic construct
  misc_feature 1..24: note = Synthetic
  source 1..24: mol_type = other DNA
ttaaccagtgagcacccgagaagc

SEQ ID NO: 10619 - DNA, 24 bp, synthetic construct
  misc_feature 1..24: note = Synthetic
  source 1..24: mol_type = other DNA
cttactcgagaagcctaggagatg

SEQ ID NO: 10620 - DNA, 24 bp, synthetic construct
  misc_feature 1..24: note = Synthetic
  source 1..24: mol_type = other DNA
acattgcagaaactagatcaatgc

SEQ ID NO: 10621 - DNA, 24 bp, synthetic construct
  misc_feature 1..24: note = Synthetic
  source 1..24: mol_type = other DNA
gtaacgagttacctggttaactcc

SEQ ID NO: 10622 - DNA, 24 bp, synthetic construct
  misc_feature 1..24: note = Synthetic
  source 1..24: mol_type = other DNA
ctcagccacgccaaaacgtattaa

SEQ ID NO: 10623 - DNA, 24 bp, synthetic construct
  misc_feature 1..24: note = Synthetic
  source 1..24: mol_type = other DNA
gttctacctatcggaggattcagc

SEQ ID NO: 10624 - DNA, 24 bp, synthetic construct
  misc_feature 1..24: note = Synthetic
  source 1..24: mol_type = other DNA
ccgctccctgaaggtccctatccc

SEQ ID NO: 10625 - DNA, 24 bp, synthetic construct
  misc_feature 1..24: note = Synthetic
  source 1..24: mol_type = other DNA
cttctgccctcgcccgttaaggca

SEQ ID NO: 10626 - DNA, 24 bp, synthetic construct
  misc_feature 1..24: note = Synthetic
  source 1..24: mol_type = other DNA
ctaaaagcttgagacccagttatg

SEQ ID NO: 10627 - DNA, 24 bp, synthetic construct
  misc_feature 1..24: note = Synthetic
  source 1..24: mol_type = other DNA
ctctgttgagccccagagcaggaa

SEQ ID NO: 10628 - DNA, 24 bp, synthetic construct
  misc_feature 1..24: note = Synthetic
  source 1..24: mol_type = other DNA
attcgagtttatctaagttactta

SEQ ID NO: 10629 - DNA, 24 bp, synthetic construct
  misc_feature 1..24: note = Synthetic
  source 1..24: mol_type = other DNA
gtgacctcactatactgcggcaat

SEQ ID NO: 10630 - DNA, 24 bp, synthetic construct
  misc_feature 1..24: note = Synthetic
  source 1..24: mol_type = other DNA
gtatctaactcttttttgaattcg

SEQ ID NO: 10631 - DNA, 24 bp, synthetic construct
  misc_feature 1..24: note = Synthetic
  source 1..24: mol_type = other DNA
aagcggaacgtctccgggccggcg

SEQ ID NO: 10632 - DNA, 24 bp, synthetic construct
  misc_feature 1..24: note = Synthetic
  source 1..24: mol_type = other DNA
aaggccatttatgttgagaagcct

SEQ ID NO: 10633 - DNA, 24 bp, synthetic construct
  misc_feature 1..24: note = Synthetic
  source 1..24: mol_type = other DNA
caaaatcacacaatagctgtaact

SEQ ID NO: 10634 - DNA, 24 bp, synthetic construct
  misc_feature 1..24: note = Synthetic
  source 1..24: mol_type = other DNA
tccacaccaaatttcaataggcgc

SEQ ID NO: 10635 - DNA, 24 bp, synthetic construct
  misc_feature 1..24: note = Synthetic
  source 1..24: mol_type = other DNA
gtaattagttacctcccgagtgac

SEQ ID NO: 10636 - DNA, 24 bp, synthetic construct
  misc_feature 1..24: note = Synthetic
  source 1..24: mol_type = other DNA
ttagtgcatctcgaataataacgt

SEQ ID NO: 10637 - DNA, 24 bp, synthetic construct
  misc_feature 1..24: note = Synthetic
  source 1..24: mol_type = other DNA
atctaaaatccatcacgacctctt

SEQ ID NO: 10638 - DNA, 24 bp, synthetic construct
  misc_feature 1..24: note = Synthetic
  source 1..24: mol_type = other DNA
gtgctgaacaccgtcgatatccgg

SEQ ID NO: 10639 - DNA, 24 bp, synthetic construct
  misc_feature 1..24: note = Synthetic
  source 1..24: mol_type = other DNA
ctgcccgatttttgccaaacaagc

SEQ ID NO: 10640 - DNA, 24 bp, synthetic construct
  misc_feature 1..24: note = Synthetic
  source 1..24: mol_type = other DNA
acatacctataactgctacctcat

SEQ ID NO: 10641 - DNA, 24 bp, synthetic construct
  misc_feature 1..24: note = Synthetic
  source 1..24: mol_type = other DNA
ctgtcgataagcgcggcatgaacc

SEQ ID NO: 10642 - DNA, 24 bp, synthetic construct
  misc_feature 1..24: note = Synthetic
  source 1..24: mol_type = other DNA
gccgatatattggtttaagtgcgg

SEQ ID NO: 10643 - DNA, 24 bp, synthetic construct
  misc_feature 1..24: note = Synthetic
  source 1..24: mol_type = other DNA
cttgccaccagacgttgaatcatc

SEQ ID NO: 10644 - DNA, 24 bp, synthetic construct
  misc_feature 1..24: note = Synthetic
  source 1..24: mol_type = other DNA
gtatgtgtgggcgctcacgcaacg

SEQ ID NO: 10645 - DNA, 24 bp, synthetic construct
  misc_feature 1..24: note = Synthetic
  source 1..24: mol_type = other DNA
ctgttctcagcttgaacagatatt

SEQ ID NO: 10646 - DNA, 24 bp, synthetic construct
  misc_feature 1..24: note = Synthetic
  source 1..24: mol_type = other DNA
cgcaaacattctatcagcggacca

SEQ ID NO: 10647 - DNA, 24 bp, synthetic construct
  misc_feature 1..24: note = Synthetic
  source 1..24: mol_type = other DNA
taagtccgagacgccggactgcca

SEQ ID NO: 10648 - DNA, 24 bp, synthetic construct
  misc_feature 1..24: note = Synthetic
  source 1..24: mol_type = other DNA
gtttcaggaccacaataagccctc

SEQ ID NO: 10649 - DNA, 24 bp, synthetic construct
  misc_feature 1..24: note = Synthetic
  source 1..24: mol_type = other DNA
tcgtgcccacaaaacatgtaaagt

SEQ ID NO: 10650 - DNA, 24 bp, synthetic construct
  misc_feature 1..24: note = Synthetic
  source 1..24: mol_type = other DNA
agtgaaagaatcacccctatgaac

SEQ ID NO: 10651 - DNA, 24 bp, synthetic construct
  misc_feature 1..24: note = Synthetic
  source 1..24: mol_type = other DNA
cacaggttacagtggtgttcagcc

SEQ ID NO: 10652 - DNA, 24 bp, synthetic construct
  misc_feature 1..24: note = Synthetic
  source 1..24: mol_type = other DNA
ctatgcaaatagttgcacttatta

SEQ ID NO: 10653 - DNA, 24 bp, synthetic construct
  misc_feature 1..24: note = Synthetic
  source 1..24: mol_type = other DNA
tgaataaagtgcctttagtgcacg

SEQ ID NO: 10654 - DNA, 24 bp, synthetic construct
  misc_feature 1..24: note = Synthetic
  source 1..24: mol_type = other DNA
ccacttgttccccgaccccataag

SEQ ID NO: 10655 - DNA, 24 bp, synthetic construct
  misc_feature 1..24: note = Synthetic
  source 1..24: mol_type = other DNA
tgttagcaaacgtagtaaaaagtc

SEQ ID NO: 10656 - DNA, 24 bp, synthetic construct
  misc_feature 1..24: note = Synthetic
  source 1..24: mol_type = other DNA
ctccgttccattcttgtagtaact

SEQ ID NO: 10657 - DNA, 24 bp, synthetic construct
  misc_feature 1..24: note = Synthetic
  source 1..24: mol_type = other DNA
acttacctaaagcctctccgccgc

SEQ ID NO: 10658 - DNA, 24 bp, synthetic construct
  misc_feature 1..24: note = Synthetic
  source 1..24: mol_type = other DNA
attctgagatcgggaagactgaca

SEQ ID NO: 10659 - DNA, 24 bp, synthetic construct
  misc_feature 1..24: note = Synthetic
  source 1..24: mol_type = other DNA
gatccatgtggtaggcttagggcc

SEQ ID NO: 10660 - DNA, 24 bp, synthetic construct
  misc_feature 1..24: note = Synthetic
  source 1..24: mol_type = other DNA
attcgcagcgagtttgtccgccgc

SEQ ID NO: 10661 - DNA, 24 bp, synthetic construct
  misc_feature 1..24: note = Synthetic
  source 1..24: mol_type = other DNA
atgcgcacagctccgacgcatcgc

SEQ ID NO: 10662 - DNA, 24 bp, synthetic construct
  misc_feature 1..24: note = Synthetic
  source 1..24: mol_type = other DNA
ctggggcatatcttgttacggacc

SEQ ID NO: 10663 - DNA, 24 bp, synthetic construct
  misc_feature 1..24: note = Synthetic
  source 1..24: mol_type = other DNA
atttctaggccacctcgttgagca

SEQ ID NO: 10664 - DNA, 24 bp, synthetic construct
  misc_feature 1..24: note = Synthetic
  source 1..24: mol_type = other DNA
ttgtaattagggatcaagcccagc

SEQ ID NO: 10665 - DNA, 24 bp, synthetic construct
  misc_feature 1..24: note = Synthetic
  source 1..24: mol_type = other DNA
agctgttcgacaaaggcatcaaag

SEQ ID NO: 10666 - DNA, 24 bp, synthetic construct
  misc_feature 1..24: note = Synthetic
  source 1..24: mol_type = other DNA
ctgagtagttctcatactgttcga

SEQ ID NO: 10667 - DNA, 24 bp, synthetic construct
  misc_feature 1..24: note = Synthetic
  source 1..24: mol_type = other DNA
cattgataaatccggttcgtagaa

SEQ ID NO: 10668 - DNA, 24 bp, synthetic construct
  misc_feature 1..24: note = Synthetic
  source 1..24: mol_type = other DNA
cccaccctaacgagctcgaatcca

SEQ ID NO: 10669 - DNA, 24 bp, synthetic construct
  misc_feature 1..24: note = Synthetic
  source 1..24: mol_type = other DNA
ggttgccaaggagcttatcaccag

SEQ ID NO: 10670 - DNA, 24 bp, synthetic construct
  misc_feature 1..24: note = Synthetic
  source 1..24: mol_type = other DNA
ccagagtgtgtcacgttcctgagg

SEQ ID NO: 10671 - DNA, 24 bp, synthetic construct
  misc_feature 1..24: note = Synthetic
  source 1..24: mol_type = other DNA
ttctaagcgctcgaaaaataaatt

SEQ ID NO: 10672 - DNA, 24 bp, synthetic construct
  misc_feature 1..24: note = Synthetic
  source 1..24: mol_type = other DNA
gctgtgattaggcttcacaggatt

SEQ ID NO: 10673 - DNA, 24 bp, synthetic construct
  misc_feature 1..24: note = Synthetic
  source 1..24: mol_type = other DNA
aatgcgtgcgcaggaccctaggca

SEQ ID NO: 10674 - DNA, 24 bp, synthetic construct
  misc_feature 1..24: note = Synthetic
  source 1..24: mol_type = other DNA
tcactatttttatccgagatcagt

SEQ ID NO: 10675 - DNA, 24 bp, synthetic construct
  misc_feature 1..24: note = Synthetic
  source 1..24: mol_type = other DNA
tcgcttttgtcgagagagtttccg

SEQ ID NO: 10676 - DNA, 24 bp, synthetic construct
  misc_feature 1..24: note = Synthetic
  source 1..24: mol_type = other DNA
cgtcgggtcctcgactctacatta

SEQ ID NO: 10677 - DNA, 24 bp, synthetic construct
  misc_feature 1..24: note = Synthetic
  source 1..24: mol_type = other DNA
taccgaaaatgaccatacattgcc

SEQ ID NO: 10678 - DNA, 24 bp, synthetic construct
  misc_feature 1..24: note = Synthetic
  source 1..24: mol_type = other DNA
cggtaaaaccactatttggcccgc

SEQ ID NO: 10679 - DNA, 24 bp, synthetic construct
  misc_feature 1..24: note = Synthetic
  source 1..24: mol_type = other DNA
ctgcacaggtgaagtgagacaatt

SEQ ID NO: 10680 - DNA, 24 bp, synthetic construct
  misc_feature 1..24: note = Synthetic
  source 1..24: mol_type = other DNA
gactgctaaacttcaaattactgc

SEQ ID NO: 10681 - DNA, 24 bp, synthetic construct
  misc_feature 1..24: note = Synthetic
  source 1..24: mol_type = other DNA
ggagttccgcctcctagatctggt

SEQ ID NO: 10682 - DNA, 24 bp, synthetic construct
  misc_feature 1..24: note = Synthetic
  source 1..24: mol_type = other DNA
ccatgcatccattaagtatcgtta

SEQ ID NO: 10683 - DNA, 24 bp, synthetic construct
  misc_feature 1..24: note = Synthetic
  source 1..24: mol_type = other DNA
tattcaactataccgaccttggtg

SEQ ID NO: 10684 - DNA, 24 bp, synthetic construct
  misc_feature 1..24: note = Synthetic
  source 1..24: mol_type = other DNA
gactacataagctgtagtgccggc

SEQ ID NO: 10685 - DNA, 24 bp, synthetic construct
  misc_feature 1..24: note = Synthetic
  source 1..24: mol_type = other DNA
gtcaaccaaaaggacttgcgatct

SEQ ID NO: 10686 - DNA, 24 bp, synthetic construct
  misc_feature 1..24: note = Synthetic
  source 1..24: mol_type = other DNA
cgcaccacacatagactcaagccc

SEQ ID NO: 10687 - DNA, 24 bp, synthetic construct
  misc_feature 1..24: note = Synthetic
  source 1..24: mol_type = other DNA
tagaaagacccttccttctaccca

SEQ ID NO: 10688 - DNA, 24 bp, synthetic construct
  misc_feature 1..24: note = Synthetic
  source 1..24: mol_type = other DNA
tctatgagacgtcatcgcggcctg

SEQ ID NO: 10689 - DNA, 24 bp, synthetic construct
  misc_feature 1..24: note = Synthetic
  source 1..24: mol_type = other DNA
tttggtgccccttcgcagccgacc

SEQ ID NO: 10690 - DNA, 24 bp, synthetic construct
  misc_feature 1..24: note = Synthetic
  source 1..24: mol_type = other DNA
tctgccaaatagagttcgccggca

SEQ ID NO: 10691 - DNA, 24 bp, synthetic construct
  misc_feature 1..24: note = Synthetic
  source 1..24: mol_type = other DNA
tgaagacctggacacgggatgatg

SEQ ID NO: 10692 - DNA, 24 bp, synthetic construct
  misc_feature 1..24: note = Synthetic
  source 1..24: mol_type = other DNA
tcacaacacctcttctcgccaacg

SEQ ID NO: 10693 - DNA, 24 bp, synthetic construct
  misc_feature 1..24: note = Synthetic
  source 1..24: mol_type = other DNA
tgcgactagactgatggcacgatt

SEQ ID NO: 10694 - DNA, 24 bp, synthetic construct
  misc_feature 1..24: note = Synthetic
  source 1..24: mol_type = other DNA
ggccttagcgaagaggtgacagac

SEQ ID NO: 10695 - DNA, 24 bp, synthetic construct
  misc_feature 1..24: note = Synthetic
  source 1..24: mol_type = other DNA
gaaattcaatctagggcccatttg

SEQ ID NO: 10696 - DNA, 24 bp, synthetic construct
  misc_feature 1..24: note = Synthetic
  source 1..24: mol_type = other DNA
gcatggccaggcaatccaatatcg

SEQ ID NO: 10697 - DNA, 24 bp, synthetic construct
  misc_feature 1..24: note = Synthetic
  source 1..24: mol_type = other DNA
atctgccgagggcgagatcctctt

SEQ ID NO: 10698 - DNA, 24 bp, synthetic construct
  misc_feature 1..24: note = Synthetic
  source 1..24: mol_type = other DNA
gccgtgatggtttatgcccatgtt

SEQ ID NO: 10699 - DNA, 24 bp, synthetic construct
  misc_feature 1..24: note = Synthetic
  source 1..24: mol_type = other DNA
ctctttctggggtgagcagcatgt

SEQ ID NO: 10700 - DNA, 24 bp, synthetic construct
  misc_feature 1..24: note = Synthetic
  source 1..24: mol_type = other DNA
actatagatactgaggttacatct

SEQ ID NO: 10701 - DNA, 24 bp, synthetic construct
  misc_feature 1..24: note = Synthetic
  source 1..24: mol_type = other DNA
atgacaactaaataggtccataga

SEQ ID NO: 10702 - DNA, 24 bp, synthetic construct
  misc_feature 1..24: note = Synthetic
  source 1..24: mol_type = other DNA
tcattaaaggctgggcttccgaat

SEQ ID NO: 10703 - DNA, 24 bp, synthetic construct
  misc_feature 1..24: note = Synthetic
  source 1..24: mol_type = other DNA
acccaagggtcggaagctccaact

SEQ ID NO: 10704 - DNA, 24 bp, synthetic construct
  misc_feature 1..24: note = Synthetic
  source 1..24: mol_type = other DNA
gtacttactactcccaccagcaac

SEQ ID NO: 10705 - DNA, 24 bp, synthetic construct
  misc_feature 1..24: note = Synthetic
  source 1..24: mol_type = other DNA
attgactaataatctatttacctc

SEQ ID NO: 10706 - DNA, 24 bp, synthetic construct
  misc_feature 1..24: note = Synthetic
  source 1..24: mol_type = other DNA
aacggcggtgctaggcggggccca

SEQ ID NO: 10707 - DNA, 24 bp, synthetic construct
  misc_feature 1..24: note = Synthetic
  source 1..24: mol_type = other DNA
ataagtggcggtgattaattacaa

SEQ ID NO: 10708 - DNA, 24 bp, synthetic construct
  misc_feature 1..24: note = Synthetic
  source 1..24: mol_type = other DNA
tccatcaacgtttcggacattggt

SEQ ID NO: 10709 - DNA, 24 bp, synthetic construct
  misc_feature 1..24: note = Synthetic
  source 1..24: mol_type = other DNA
gacccctactccgctaggagtacc

SEQ ID NO: 10710 - DNA, 24 bp, synthetic construct
  misc_feature 1..24: note = Synthetic
  source 1..24: mol_type = other DNA
gactcggagtcttctaggcaacct

SEQ ID NO: 10711 - DNA, 24 bp, synthetic construct
  misc_feature 1..24: note = Synthetic
  source 1..24: mol_type = other DNA
agatatcttatccttttctttaag

SEQ ID NO: 10712 - DNA, 24 bp, synthetic construct
  misc_feature 1..24: note = Synthetic
  source 1..24: mol_type = other DNA
gtcactgttagttgagaaccacag

SEQ ID NO: 10713 - DNA, 24 bp, synthetic construct
  misc_feature 1..24: note = Synthetic
  source 1..24: mol_type = other DNA
atccgagggcgaacaccgcacggc

SEQ ID NO: 10714 - DNA, 24 bp, synthetic construct
  misc_feature 1..24: note = Synthetic
  source 1..24: mol_type = other DNA
cagaccacattccgaagattatta

SEQ ID NO: 10715 - DNA, 24 bp, synthetic construct
  misc_feature 1..24: note = Synthetic
  source 1..24: mol_type = other DNA
gcctactccgcggcaaccgcggtg

SEQ ID NO: 10716 - DNA, 24 bp, synthetic construct
  misc_feature 1..24: note = Synthetic
  source 1..24: mol_type = other DNA
ggcggtgttcccagctcggccgtg

SEQ ID NO: 10717 - DNA, 24 bp, synthetic construct
  misc_feature 1..24: note = Synthetic
  source 1..24: mol_type = other DNA
ccagtcctcggcgcacgaataggt

SEQ ID NO: 10718 - DNA, 24 bp, synthetic construct
  misc_feature 1..24: note = Synthetic
  source 1..24: mol_type = other DNA
ccaaggcatcgcgtctcaaagtaa

SEQ ID NO: 10719 - DNA, 24 bp, synthetic construct
  misc_feature 1..24: note = Synthetic
  source 1..24: mol_type = other DNA
gtttcttcaagctgcgcttccaat

SEQ ID NO: 10720 - DNA, 24 bp, synthetic construct
  misc_feature 1..24: note = Synthetic
  source 1..24: mol_type = other DNA
agctctgtatgcgtacgataacaa

SEQ ID NO: 10721 - DNA, 24 bp, synthetic construct
  misc_feature 1..24: note = Synthetic
  source 1..24: mol_type = other DNA
gatacaagtagcggccggctatgc

SEQ ID NO: 10722 - DNA, 24 bp, synthetic construct
  misc_feature 1..24: note = Synthetic
  source 1..24: mol_type = other DNA
gatacgtcattcgaaatcctgcag

SEQ ID NO: 10723 - DNA, 24 bp, synthetic construct
  misc_feature 1..24: note = Synthetic
  source 1..24: mol_type = other DNA
gtcttggccgagatcgtttgctgc

SEQ ID NO: 10724 - DNA, 24 bp, synthetic construct
  misc_feature 1..24: note = Synthetic
  source 1..24: mol_type = other DNA
gatgttccgccacacgctgctaag

SEQ ID NO: 10725 - DNA, 24 bp, synthetic construct
  misc_feature 1..24: note = Synthetic
  source 1..24: mol_type = other DNA
cccttaactcaagaatggtatgtg

SEQ ID NO: 10726 - DNA, 24 bp, synthetic construct
  misc_feature 1..24: note = Synthetic
  source 1..24: mol_type = other DNA
cggtactgctatataagctatttt

SEQ ID NO: 10727 - DNA, 24 bp, synthetic construct
  misc_feature 1..24: note = Synthetic
  source 1..24: mol_type = other DNA
tttagcgagagcccccgcgacacc

SEQ ID NO: 10728 - DNA, 24 bp, synthetic construct
  misc_feature 1..24: note = Synthetic
  source 1..24: mol_type = other DNA
caactcatgcggccacgattcagc

SEQ ID NO: 10729 - DNA, 24 bp, synthetic construct
  misc_feature 1..24: note = Synthetic
  source 1..24: mol_type = other DNA
atgtttatacccagtgggaccttg

SEQ ID NO: 10730 - DNA, 24 bp, synthetic construct
  misc_feature 1..24: note = Synthetic
  source 1..24: mol_type = other DNA
aggatcctgtaccctagtgacaac

SEQ ID NO: 10731 - DNA, 24 bp, synthetic construct
  misc_feature 1..24: note = Synthetic
  source 1..24: mol_type = other DNA
ctttgaggatataggcccgcggcc

SEQ ID NO: 10732 - DNA, 24 bp, synthetic construct
  misc_feature 1..24: note = Synthetic
  source 1..24: mol_type = other DNA
tgccggggtacgcactagccgata

SEQ ID NO: 10733 - DNA, 24 bp, synthetic construct
  misc_feature 1..24: note = Synthetic
  source 1..24: mol_type = other DNA
cccaatactacgttttattgcgat

SEQ ID NO: 10734 - DNA, 24 bp, synthetic construct
  misc_feature 1..24: note = Synthetic
  source 1..24: mol_type = other DNA
taacccgggtcgacaggctacggg

SEQ ID NO: 10735 - DNA, 24 bp, synthetic construct
  misc_feature 1..24: note = Synthetic
  source 1..24: mol_type = other DNA
atcaaatctgactgtcacggcagc

SEQ ID NO: 10736 - DNA, 24 bp, synthetic construct
  misc_feature 1..24: note = Synthetic
  source 1..24: mol_type = other DNA
cgcgcgatgtagttttctgcacta

SEQ ID NO: 10737 - DNA, 24 bp, synthetic construct
  misc_feature 1..24: note = Synthetic
  source 1..24: mol_type = other DNA
acccgatcctgggattccctatcg

SEQ ID NO: 10738 - DNA, 24 bp, synthetic construct
  misc_feature 1..24: note = Synthetic
  source 1..24: mol_type = other DNA
cttctatcagcctatctctggggc

SEQ ID NO: 10739 - DNA, 24 bp, synthetic construct
  misc_feature 1..24: note = Synthetic
  source 1..24: mol_type = other DNA
gctgactccttcttgggaatctgc

SEQ ID NO: 10740 - DNA, 24 bp, synthetic construct
  misc_feature 1..24: note = Synthetic
  source 1..24: mol_type = other DNA
agagaatatcacgtccgtgcaaag

SEQ ID NO: 10741 - DNA, 20 bp, synthetic construct
  misc_feature 1..20: note = Synthetic
  source 1..20: mol_type = other DNA
catgcgccatatggtcttcc

SEQ ID NO: 10742 - DNA, 20 bp, synthetic construct
  misc_feature 1..20: note = Synthetic
  source 1..20: mol_type = other DNA
atacaaatgggcaggtcacg

SEQ ID NO: 10743 - DNA, 20 bp, synthetic construct
  misc_feature 1..20: note = Synthetic
  source 1..20: mol_type = other DNA
gaaaagaataagccagagga

SEQ ID NO: 10744 - DNA, 20 bp, synthetic construct
  misc_feature 1..20: note = Synthetic
  source 1..20: mol_type = other DNA
ctgacaggaggaggaggcgg

SEQ ID NO: 10745 - DNA, 20 bp, synthetic construct
  misc_feature 1..20: note = Synthetic
  source 1..20: mol_type = other DNA
ctgaaaaaggaaggagttga

SEQ ID NO: 10746 - DNA, 20 bp, synthetic construct
  misc_feature 1..20: note = Synthetic
  source 1..20: mol_type = other DNA
aagatgaaaggaaaggcgtt

SEQ ID NO: 10747 - DNA, 18 bp, synthetic construct
  misc_feature 1..18: note = Synthetic
  source 1..18: mol_type = other DNA
atggagaagagcccaaga

SEQ ID NO: 10748 - DNA, 18 bp, synthetic construct
  misc_feature 1..18: note = Synthetic
  source 1..18: mol_type = other DNA
tccgcagccatgtccacc

SEQ ID NO: 10749 - DNA, 20 bp, synthetic construct
  misc_feature 1..20: note = Synthetic
  source 1..20: mol_type = other DNA
tcagcaacctctaactaacc

SEQ ID NO: 10750 - DNA, 20 bp, synthetic construct
  misc_feature 1..20: note = Synthetic
  source 1..20: mol_type = other DNA
ttacaggagtacaaaccacc

SEQ ID NO: 10751 - DNA, 20 bp, synthetic construct
  misc_feature 1..20: note = Synthetic
  source 1..20: mol_type = other DNA
tcctgtaaagcaccaggagg

SEQ ID NO: 10752 - DNA, 20 bp, synthetic construct
  misc_feature 1..20: note = Synthetic
  source 1..20: mol_type = other DNA
accaaagaggaggtttggct

SEQ ID NO: 10753 - DNA, 20 bp, synthetic construct
  misc_feature 1..20: note = Synthetic
  source 1..20: mol_type = other DNA
agcagcacaaaagcattccg

SEQ ID NO: 10754 - DNA, 20 bp, synthetic construct
  misc_feature 1..20: note = Synthetic
  source 1..20: mol_type = other DNA
agcccgctgagacttgaatc

SEQ ID NO: 10755 - DNA, 19 bp, synthetic construct
  misc_feature 1..19: note = Synthetic
  source 1..19: mol_type = other DNA
ctcgttcgcctcttctccg

SEQ ID NO: 10756 - DNA, 20 bp, synthetic construct
  misc_feature 1..20: note = Synthetic
  source 1..20: mol_type = other DNA
ggtggacgtagtcacgtagc

SEQ ID NO: 10757 - DNA, 100 bp, synthetic construct
  misc_feature 1..100: note = Synthetic
  source 1..100: mol_type = other DNA
aatgatacggcgaccaccgagatctacactctttccctacacgacgctcttccgatcttaagtagaggctttatatatcttgtggaaaggacgaaacacc

SEQ ID NO: 10758 - DNA, 101 bp, synthetic construct
  misc_feature 1..101: note = Synthetic
  source 1..101: mol_type = other DNA
aatgatacggcgaccaccgagatctacactctttccctacacgacgctcttccgatctatcatgcttagctttatatatcttgtggaaaggacgaaacacc

SEQ ID NO: 10759 - DNA, 102 bp, synthetic construct
  misc_feature 1..102: note = Synthetic
  source 1..102: mol_type = other DNA
aatgatacggcgaccaccgagatctacactctttccctacacgacgctcttccgatctgatgcacatctgctttatatatcttgtggaaaggacgaaacacc

SEQ ID NO: 10760 - DNA, 103 bp, synthetic construct
  misc_feature 1..103: note = Synthetic
  source 1..103: mol_type = other DNA
aatgatacggcgaccaccgagatctacactctttccctacacgacgctcttccgatctcgattgctcgacgctttatatatcttgtggaaaggacgaaacacc

SEQ ID NO: 10761 - DNA, 104 bp, synthetic construct
  misc_feature 1..104: note = Synthetic
  source 1..104: mol_type = other DNA
aatgatacggcgaccaccgagatctacactctttccctacacgacgctcttccgatcttcgatagcaattcgctttatatatcttgtggaaaggacgaaacacc

SEQ ID NO: 10762 - DNA, 105 bp, synthetic construct
  misc_feature 1..105: note = Synthetic
  source 1..105: mol_type = other DNA
aatgatacggcgaccaccgagatctacactctttccctacacgacgctcttccgatctatcgatagttgcttgctttatatatcttgtggaaaggacgaaacacc

SEQ ID NO: 10763 - DNA, 106 bp, synthetic construct
  misc_feature 1..106: note = Synthetic
  source 1..106: mol_type = other DNA
aatgatacggcgaccaccgagatctacactctttccctacacgacgctcttccgatctgatcgatccagttaggctttatatatcttgtggaaaggacgaaacacc

SEQ ID NO: 10764 - DNA, 107 bp, synthetic construct
  misc_feature 1..107: note = Synthetic
  source 1..107: mol_type = other DNA
aatgatacggcgaccaccgagatctacactctttccctacacgacgctcttccgatctcgatcgatttgagcctgctttatatatcttgtggaaaggacgaaacacc

SEQ ID NO: 10765 - DNA, 108 bp, synthetic construct
  misc_feature 1..108: note = Synthetic
  source 1..108: mol_type = other DNA
aatgatacggcgaccaccgagatctacactctttccctacacgacgctcttccgatctacgatcgatacacgatcgctttatatatcttgtggaaaggacgaaacacc

SEQ ID NO: 10766 - DNA, 109 bp, synthetic construct
  misc_feature 1..109: note = Synthetic
  source 1..109: mol_type = other DNA
aatgatacggcgaccaccgagatctacactctttccctacacgacgctcttccgatcttacgatcgatggtccagagctttatatatcttgtggaaaggacgaaacacc

SEQ ID NO: 10767 - DNA, 90 bp, synthetic construct
  misc_feature 1..90: note = Synthetic
  source 1..90: mol_type = other DNA
caagcagaagacggcatacgagattcgccttggtgactggagttcagacgtgtgctcttccgatcttaaagcagcgtatccacatagcgt

SEQ ID NO: 10768 - DNA, 90 bp, synthetic construct
  misc_feature 1..90: note = Synthetic
  source 1..90: mol_type = other DNA
caagcagaagacggcatacgagatatagcgtcgtgactggagttcagacgtgtgctcttccgatcttaaagcagcgtatccacatagcgt

SEQ ID NO: 10769 - DNA, 90 bp, synthetic construct
  misc_feature 1..90: note = Synthetic
  source 1..90: mol_type = other DNA
caagcagaagacggcatacgagatgaagaagtgtgactggagttcagacgtgtgctcttccgatcttaaagcagcgtatccacatagcgt

SEQ ID NO: 10770 - DNA, 90 bp, synthetic construct
  misc_feature 1..90: note = Synthetic
  source 1..90: mol_type = other DNA
caagcagaagacggcatacgagatattctagggtgactggagttcagacgtgtgctcttccgatcttaaagcagcgtatccacatagcgt

SEQ ID NO: 10771 - DNA, 90 bp, synthetic construct
  misc_feature 1..90: note = Synthetic
  source 1..90: mol_type = other DNA
caagcagaagacggcatacgagatcgttaccagtgactggagttcagacgtgtgctcttccgatcttaaagcagcgtatccacatagcgt

SEQ ID NO: 10772 - DNA, 90 bp, synthetic construct
  misc_feature 1..90: note = Synthetic
  source 1..90: mol_type = other DNA
caagcagaagacggcatacgagatgtctgatggtgactggagttcagacgtgtgctcttccgatcttaaagcagcgtatccacatagcgt

SEQ ID NO: 10773 - DNA, 90 bp, synthetic construct
  misc_feature 1..90: note = Synthetic
  source 1..90: mol_type = other DNA
caagcagaagacggcatacgagatttacgcacgtgactggagttcagacgtgtgctcttccgatcttaaagcagcgtatccacatagcgt

SEQ ID NO: 10774 - DNA, 90 bp, synthetic construct
  misc_feature 1..90: note = Synthetic
  source 1..90: mol_type = other DNA
caagcagaagacggcatacgagatttgaataggtgactggagttcagacgtgtgctcttccgatcttaaagcagcgtatccacatagcgt

SEQ ID NO: 10775 - DNA, 90 bp, synthetic construct
  misc_feature 1..90: note = Synthetic
  source 1..90: mol_type = other DNA
caagcagaagacggcatacgagattccttggtgtgactggagttcagacgtgtgctcttccgatcttaaagcagcgtatccacatagcgt

SEQ ID NO: 10776 - DNA, 90 bp, synthetic construct
  misc_feature 1..90: note = Synthetic
  source 1..90: mol_type = other DNA
caagcagaagacggcatacgagatacaggtatgtgactggagttcagacgtgtgctcttccgatcttaaagcagcgtatccacatagcgt

SEQ ID NO: 10777 - DNA, 90 bp, synthetic construct
  misc_feature 1..90: note = Synthetic
  source 1..90: mol_type = other DNA
caagcagaagacggcatacgagataggtaagggtgactggagttcagacgtgtgctcttccgatcttaaagcagcgtatccacatagcgt

SEQ ID NO: 10778 - DNA, 90 bp, synthetic construct
  misc_feature 1..90: note = Synthetic
  source 1..90: mol_type = other DNA
caagcagaagacggcatacgagataacaatgggtgactggagttcagacgtgtgctcttccgatcttaaagcagcgtatccacatagcgt

SEQ ID NO: 10779 - DNA, 58 bp, synthetic construct
  misc_feature 1..58: note = Synthetic
  source 1..58: mol_type = other DNA
aatgatacggcgaccaccgagatctacactctttccctacacgacgctcttccgatct

SEQ ID NO: 10780 - DNA, 30 bp, synthetic construct
  misc_feature 1..30: note = Synthetic
  source 1..30: mol_type = other DNA
ttggctttatatatcttgtggaaaggacga

SEQ ID NO: 10781 - DNA, 48 bp, synthetic construct
  misc_feature 1..48: note = Synthetic
  source 1..48: mol_type = other DNA
ctttccctacacgacgctcttccgatctcgtcgccagccaaacataag

SEQ ID NO: 10782 - DNA, 55 bp, synthetic construct
  misc_feature 1..55: note = Synthetic
  source 1..55: mol_type = other DNA
gactggagttcagacgtgtgctcttccgatctcccacgttgcatgtaaaactgaa

SEQ ID NO: 10783 - DNA, 48 bp, synthetic construct
  misc_feature 1..48: note = Synthetic
  source 1..48: mol_type = other DNA
ctttccctacacgacgctcttccgatctatcggtctccagaggtgcta

SEQ ID NO: 10784 - DNA, 57 bp, synthetic construct
  misc_feature 1..57: note = Synthetic
  source 1..57: mol_type = other DNA
gactggagttcagacgtgtgctcttccgatctagacatctttgcctaaaaacaactt

SEQ ID NO: 10785 - DNA, 20 bp, synthetic construct
  misc_feature 1..20: note = Synthetic
  source 1..20: mol_type = other DNA
acacctcaggagacctgtaa

SEQ ID NO: 10786 - DNA, 24 bp, synthetic construct
  misc_feature 1..24: note = Synthetic
  misc_feature 1: note = /56-FAM/ Taqman probe with dye
  misc_feature 11: note = /ZEN/
  misc_feature 24: note = /3lABkFQ/ black hole quencher
  source 1..24: mol_type = other DNA
aactgacaggaactgccgaagtcc

SEQ ID NO: 10787 - DNA, 20 bp, synthetic construct
  misc_feature 1..20: note = Synthetic
  source 1..20: mol_type = other DNA
ccgaagagaagcgcgataaa

SEQ ID NO: 10788 - protein, 288 aa, synthetic construct
  REGION 1..288: note = Synthetic
MDPIRSRTPSPARELLSGPQPDGVQPTADRGVSPPAGGPLDGLPARRTMSRTRLPSPPAPSPAFSADSFSDLLRQFDPSLFNTSLFDSLPPFGAHHTEAATGEWDEVQSGLRAADAPPPTMRVAVTAARPPRAKPAPRRRAAQPSDASPAAQVDLRTLGYSQQQQEKIKPKVRSTVAQHHEALVGHGFTHAHIVALSQHPAALGTVAVKYQDMIAALPEATHEAIVGVGKQWSGARALEALLTVAGELRGPPLQLDTGQLLKIAKRGGVTAVEAVHAWRNALTGAPLN

SEQ ID NO: 10789 - protein, 183 aa, synthetic construct
  REGION 1..183: note = Synthetic
RPALESIVAQLSRPDPALAALTNDHLVALACLGGRPALDAVKKGLPHAPALIKRTNRRIPERTSHRVADHAQVVRVLGFFQCHSHPAQAFDDAMTQFGMSRHGLLQLFRRVGVTELEARSGTLPPASQRWDRILQASGMKRAKPSPTSTQTPDQASLHAFADSLERDLDAPSPMHEGDQTRAS

SEQ ID NO: 10790 - protein, 7 aa, Simian virus 40
PKKKRKV

SEQ ID NO: 10791 - protein, 10 aa, Simian virus 40
PKKKRKVEAS

SEQ ID NO: 10792 - protein, 16 aa, synthetic construct
  REGION 1..16: note = Synthetic
KRPAATKKAGQAKKKK

SEQ ID NO: 10793 - protein, 9 aa, Homo sapiens
PAAKRVKLD

SEQ ID NO: 10794 - protein, 11 aa, Homo sapiens
RQRRNELKRSP

SEQ ID NO: 10795 - protein, 38 aa, Homo sapiens
NQSSNFGPMKGGNFGGRSSGPYGGGGQYFAKPRNQGGY

SEQ ID NO: 10796 - protein, 42 aa, Homo sapiens
RMRIZFKNKGKDTAELRRRRVEVSVELRKAKKDEQILKRRNV

SEQ ID NO: 10797 - protein, 8 aa, Homo sapiens
VSRKRPRP

SEQ ID NO: 10798 - protein, 8 aa, Homo sapiens
PPKKARED

SEQ ID NO: 10799 - protein, 8 aa, Homo sapiens
PQPKKKPL

SEQ ID NO: 10800 - protein, 12 aa, Mus sp.
SALIKKKKKMAP

SEQ ID NO: 10801 - protein, 5 aa, Influenza virus
DRLRR

SEQ ID NO: 10802 - protein, 7 aa, Influenza virus
PKQKKRK

SEQ ID NO: 10803 - protein, 10 aa, Hepatitis D virus
RKLKKKIKKL

SEQ ID NO: 10804 - protein, 10 aa, Mus sp.
REKKKFLKRR

SEQ ID NO: 10805 - protein, 20 aa, Homo sapiens
KRKGDEVDGVDEVAKKKSKK

SEQ ID NO: 10806 - protein, 17 aa, Homo sapiens
RKCLQAGMNLEARKTKK

SEQ ID NO: 10807 - protein, 686 aa, Homo sapiens
MQLGEQLLVSSVNLPGAHFYPLESARGGSGGSAGHLPSAAPSPQKLDLDKASKKFSGSLSCEAVSGEPAAASAGAPAAMLSDTDAGDAFASAAAVAKPGPPDGRKGSPCGEEELPSAAAAAAAAAAAAAATARYSMDSLSSERYYLQSPGPQGSELAAPCSLFPYQAAAGAPHGPVYPAPNGARYPYGSMLPPGGFPAAVCPPGRAQFGPGAGAGSGAGGSSGGGGGPGTYQYSQGAPLYGPYPGAAAAGSCGGLGGLGVPGSGFRAHVYLCNRPLWLKFHRHQTEMIITKQGRRMFPFLSFNINGLNPTAHYNVFVEVVLADPNHWRFQGGKWVTCGKADNNMQGNKMYVHPESPNTGSHWMRQEISFGKLKLTNNKGANNNNTQMIVLQSLHKYQPRLHIVEVTEDGVEDLNEPSKTQTFTFSETQFIAVTAYQNTDITQLKIDHNPFAKGFRDNYDSSHQIVPGGRYGVQSFFPEPFVNTLPQARYYNGERTVPQTNGLLSPQQSEEVANPPQRWLVTPVQQPGTNKLDISSYESEYTSSTLLPYGIKSLPLQTSHALGYYPDPTFPAMAGWGGRGSYQRKMAAGLPWTSRTSPTVFSEDQLSKEKVKEEIGSSWIETPPSIKSLDSNDSGVYTSACKRRRLSPSNSSNENSPSIKCEDINAEEYSKDTSKGMGGYYAFYTTP

SEQ ID NO: 10808 - protein, 705 aa, Homo sapiens
MQLGEQLLVSSVNLPGAHFYPLESARGGSGGSAGHLPSAAPSPQKLDLDKASKKFSGSLSCEAVSGEPAAASAGAPAAMLSDTDAGDAFASAAAVAKPGPPDGRKGSPCGEEELPSAAAAAAAAAAAAAATARYSMDSLSSERYYLQSPGPQGSELAAPCSLFPYQAAAGAPHGPVYPAPNGARYPYGSMLPPGGFPAAVCPPGRAQFGPGAGAGSGAGGSSGGGGGPGTYQYSQGAPLYGPYPGAAAAGSCGGLGGLGVPGSGFRAHVYLCNRPLWLKFHRHQTEMIITKQGRRMFPFLSFNINGLNPTAHYNVFVEVVLADPNHWRFQGGKWVTCGKADNNMQGNKMYVHPESPNTGSHWMRQEISFGKLKLTNNKGANNNNTQMIVLQSLHKYQPRLHIVEVTEDGVEDLNEPSKTQTFTFSETQFIAVTAYQNTDITQLKIDHNPFAKGFRDNYDSMYTASENDRLTPSPTDSPRSHQIVPGGRYGVQSFFPEPFVNTLPQARYYNGERTVPQTNGLLSPQQSEEVANPPQRWLVTPVQQPGTNKLDISSYESEYTSSTLLPYGIKSLPLQTSHALGYYPDPTFPAMAGWGGRGSYQRKMAAGLPWTSRTSPTVFSEDQLSKEKVKEEIGSSWIETPPSIKSLDSNDSGVYTSACKRRRLSPSNSSNENSPSIKCEDINAEEYSKDTSKGMGGYYAFYTTP

SEQ ID NO: 10809 - DNA, 63 bp, synthetic construct
  misc_feature 1..63: note = Synthetic
  source 1..63: mol_type = other DNA
ggcagtggagagggcagaggaagtctgctaacatgcggtgacgtcgaggagaatcctggccca
